(19) United States
(12) Patent Application Publication
(10) Pub. No.: US 2006/0073561 A1
(43) Pub. Date: Apr. 6, 2006

(54) 157 human secreted proteins

(76) Inventors: Craig A. Rosen, Laytonsville, MD (US); Steven M. Ruben, Brookeville, MD (US); Henrik S. Olsen, Gaithersburg, MD (US); Kevin P. Baker, Darnestown, MD (US); Michele Fiscella, Bethesda, MD (US); Ping Wei, Agoura Hills, CA (US); Charles E. Birse, North Potomac, MD (US); George A. Komatsoulis, Silver Spring, MD (US); Gil H. Choi, Rockville, MD (US); Paul A. Moore, North Bethesda, MD (US); Ram Gupta, Gaithersburg, MD (US); Yanggu Shi, Gaithersburg, MD (US)

Correspondence Address: HUMAN GENOME SCIENCES INC;INTELLECTUAL PROPERTY DEPT., 14200 SHADY GROVE ROAD, ROCKVILLE, MD, 20850, US

(21) Appl. No.: 10/986,405

(22) Filed: Nov. 12, 2004

Related U.S. Application Data
(63) Continuation-in-part of application No. PCT/US03/15439, filed on May 16, 2003.
(60) Provisional application No. 60/381,592, filed on May 17, 2002.
(60) Provisional application No. 60/388,543, filed on Jun. 12, 2002.
(60) Provisional application No. 60/401,757, filed on Aug. 8, 2002.
(60) Provisional application No. 60/402,585, filed on Aug. 12, 2002.
(60) Provisional application No. 60/402,799, filed on Aug. 13, 2002.
(60) Provisional application No. 60/404,959, filed on Aug. 22, 2002.
(60) Provisional application No. 60/415,902, filed on Oct. 4, 2002.

(51) Int. Cl. A61K 38/17; C07K 14/47; C07H 21/04; C12P 21/06

(52) U.S. Cl. 435/69.1; 435/320.1; 435/325; 530/350; 514/12; 536/23.5

(57) ABSTRACT

The present invention relates to human secreted polypeptides, and isolated nucleic acid molecules encoding said polypeptides, useful for diagnosing and treating diseases, disorders, and/or conditions related to said human secreted proteins. Antibodies that bind these polypeptides are also encompassed by the present invention. Also encompassed by the invention are vectors, host cells, and recombinant and synthetic methods for producing said polynucleotides, polypeptides, and/or antibodies. The invention further encompasses screening methods for identifying agonists and antagonists of polynucleotides and polypeptides of the invention. The present invention further encompasses methods and compositions for inhibiting or enhancing the production and function of the polypeptides of the present invention.

### CROSS REFERENCE TO RELATED APPLICATIONS

[0001] This application is a continuation-in-part of International Patent Application No. PCT/US2003/015439, filed May 16, 2003, which claims benefit under 35 USC § 119(e) of U.S. Provisional Applications Nos. 60/381,592, filed May 17, 2002, 60/388,543, filed Jun. 12, 2002, 60/401,757, filed Aug. 8, 2002, 60/402,585, filed Aug. 12, 2002, 60/402,799, filed Aug. 13, 2002, 60/404,959, filed Aug. 22, 2002, and 60/415,902, filed Oct. 4, 2002. Each of the above-identified applications is hereby incorporated by reference in its entirety.

### FIELD OF THE INVENTION

[0002] The present invention relates to human secreted proteins/polypeptides, and isolated nucleic acid molecules encoding said proteins/polypeptides, useful for detecting, preventing, diagnosing, prognosticating, treating, and/or ameliorating diseases and disorders related to said proteins/polypeptides (relatedness may be by direct or indirect association, by cause, by consequence, or by effect on said diseases and disorders). Antibodies that bind these polypeptides are also encompassed by the present invention. Also encompassed by the invention are vectors, host cells, and recombinant and synthetic methods for producing said polynucleotides, polypeptides, and/or antibodies. The invention further encompasses screening methods for identifying agonists and antagonists of polynucleotides and polypeptides of the invention. The present invention further encompasses methods and compositions for inhibiting or enhancing the production and function of the polypeptides of the present invention.

### BACKGROUND OF THE INVENTION

[0003] Unlike bacteria, which exist as a single compartment surrounded by a membrane, human cells and other eukaryotes are subdivided by membranes into many functionally distinct compartments. Each membrane-bounded compartment, or organelle, contains different proteins essential for the function of the organelle. The cell uses “sorting signals,” which are amino acid motifs located within the protein, to target proteins to particular cellular organelles.

[0004] One type of sorting signal, called a signal sequence, a signal peptide, or a leader sequence, directs a class of proteins to an organelle called the endoplasmic reticulum (ER). The ER separates the membrane-bounded proteins from all other types of proteins. Once localized to the ER, both groups of proteins can be further directed to another organelle called the Golgi apparatus. Here, the Golgi distributes the proteins to vesicles, including secretory vesicles, the cell membrane, lysosomes, and the other organelles.

[0005] Proteins targeted to the ER by a signal sequence can be released into the extracellular space as a secreted protein. For example, vesicles containing secreted proteins can fuse with the cell membrane and release their contents into the extracellular space—a process called exocytosis. Exocytosis can occur constitutively or after receipt of a triggering signal. In the latter case, the proteins are stored in secretory vesicles (or secretory granules) until exocytosis is triggered. Similarly, proteins residing on the cell membrane can also be secreted into the extracellular space by proteolytic cleavage of a “linker” holding the protein to the membrane.

[0006] Thus there exists a clear need for identifying and using novel secreted polynucleotides and polypeptides. Identification and sequencing of human genes is a major goal of modern scientific research. For example, by identifying genes and determining their sequences, scientists have been able to make large quantities of valuable human “gene products.” These include human insulin, interferon, Factor VIII, tumor necrosis factor, human growth hormone, tissue plasminogen activator, and numerous other compounds. Additionally, knowledge of gene sequences can provide the key to treatment or cure of genetic diseases (such as muscular dystrophy and cystic fibrosis).

[0007] Over the past few decades, an increasing percentage of the population has become diabetic. Diabetes mellitus is categorized into two types: Type I, known as Insulin-Dependent Diabetes Mellitus (IDDM), or Type II, known as Non-Insulin-Dependent Diabetes Mellitus (NIDDM). IDDM is an autoimmune disorder in which the insulin-secreting pancreatic beta cells of the islets of Langerhans are destroyed. In these individuals, recombinant insulin therapy is employed to maintain glucose homeostasis and normal energy metabolism. NIDDM, on the other hand, is a polygenic disorder with no one gene responsible for the progression of the disease.

[0008] In NIDDM, insulin resistance eventually leads to the abolishment of insulin secretion resulting in insulin deficiency. Insulin resistance, at least in part, ensues from a block at the level of glucose uptake and phosphorylation in humans. Diabetics demonstrate a decrease in expression in adipose tissue of insulin-receptor substrate 1 (“IRS1”) (Carvalho et al., FASEB J 13(15):2173-8 (1999)), glucose transporter 4 (“GLUT4”) (Garvey et al., Diabetes 41(4):465-75 (1992)), and the novel abundant protein M gene transcript 1 (“apM1”) (Statnick et al., Int J Exp Diabetes 1(2): 81-8 (2000)), as well as other as of yet unidentified factors. Insulin deficiency in NIDDM leads to failure of normal pancreatic beta-cell function and eventually to pancreatic-beta cell death.

[0009] Insulin affects fat, muscle, and liver. Insulin is the major regulator of energy metabolism. Malfunctioning of any step(s) in insulin secretion and/or action can lead to many disorders, including for example the dysregulation of oxygen utilization, adipogenesis, glycogenesis, lipogenesis, glucose uptake, protein synthesis, thermogenesis, and maintenance of the basal metabolic rate. This malfunctioning results in diseases and/or disorders that include, but are not limited to, hyperinsulinemia, insulin resistance, insulin deficiency, hyperglycemia, hyperlipidemia, hyperketonemia, and diabetes.

[0010] Numerous debilitating diabetes-related secondary effects include, but are not limited to, obesity, forms of blindness (cataracts and diabetic retinopathy), limb amputations, kidney failure, fatty liver, coronary artery disease, and neuropathy.

[0011] Some of the current drugs used to treat insulin resistance and/or diabetes (e.g., insulin secretagogues—sulfonylurea, insulin sensitizers—thiazolidenediones and metformin, and alpha-glucosidase and lipase inhibitors) are inadequate due to the dosage amounts and frequency with which they have to be administered as a result of poor pharmacokinetic properties, the lack of effective control over blood sugar levels, and potential side effects, among other reasons. Diabetes Therapeutic proteins in their native state or when recombinantly produced exhibit a rapid in vivo clearance. Typically, significant amounts of therapeutics are required to be effective during therapy. In addition, small molecules smaller than the 20 kDa range can be readily filtered through the renal tubules (glomerulus) leading to dose-dependent nephrotoxicity. Therefore, there is a need for improvement in treatment (e.g., a need for prolonging the effects of therapeutics of diabetes and/or diabetes related conditions).

### SUMMARY OF THE INVENTION

[0012] The present invention relates to human secreted proteins/polypeptides, and isolated nucleic acid molecules encoding said proteins/polypeptides, useful for detecting, preventing, diagnosing, prognosticating, treating, and/or ameliorating diseases and disorders related to said proteins/polypeptides (relatedness may be by direct or indirect association, or by cause, consequence, or effect on said diseases and disorders). Antibodies that bind these polypeptides are also encompassed by the present invention. Also encompassed by the invention are vectors, host cells, and recombinant and synthetic methods for producing said polynucleotides, polypeptides, and/or antibodies. The invention further encompasses screening methods for identifying agonists and antagonists of polynucleotides and polypeptides of the invention. The present invention further encompasses methods and compositions for inhibiting or enhancing the production and function of the polypeptides of the present invention.

### DETAILED DESCRIPTION

Polynucleotides and Polypeptides of the Invention

Features of Protein Encoded by Gene No: 1

[0013] The translation product of this gene shares sequence homology with alpha-2 antiplasmin precursor, a serine protease inhibitor or serpin, which is thought to be important in modulating the destruction of fibrin clots. Alpha-2 antiplasmin inhibits the action of the serine protease plasmin, the primary mechanism by which fibrin clots are degraded (Holmes, Nelles, Lijnen, and Colleen, J. Biol. Chem. 1987 5:1659-64).

[0014] This gene is expressed primarily in fetal liver spleen, fetal liver-Enzyme subtraction, diabetic liver, Kidney (NCI_CGAP_Kid3), and liver hepatoma.

[0015] Polynucleotides and polypeptides of the invention are useful as reagents for differential identification of the tissue(s) or cell type(s) present in a biological sample and for diagnosis of diseases and conditions which include but are not limited to: liver disease, especially hepatocellular tumors. Similarly, polypeptides and antibodies directed to these polypeptides are useful in providing immunological probes for differential identification of the tissue(s) or cell type(s). For a number of disorders of the above tissues or cells, particularly of the liver, expression of this gene at significantly higher or lower levels may be routinely detected in certain tissues or cell types (e.g., cancerous and wounded tissues) or bodily fluids (e.g., serum, plasma, urine, synovial fluid and spinal fluid) or another tissue or sample taken from an individual having such a disorder, relative to the standard gene expression level, i.e., the expression level in healthy tissue or bodily fluid from an individual not having the disorder.

[0016] Embodiments of the invention encompass using polynucleotides and polypeptides (including fragments and variants thereof, and also antibodies, agonists and antagonists thereof) to prevent, diagnose, treat, or ameliorate a disease or disorder. In preferred embodiments, the present invention encompasses a method of preventing, diagnosing, treating, or ameliorating a disease or disorder related to one, two, three, or more, of the cells, tissues, and organs where the polynucleotide and/or polypeptide is expressed (for example, as indicated in Column 8 of Table 1B or as indicated in the “Preferred Indications” column of Table 1D; comprising administering to a patient in which such prevention, diagnosis, treatment, or amelioration is desired a protein, nucleic acid, or antibody of the invention (or fragment or variant thereof) represented by Table 1A (in the same row as the disease or disorder to be treated is listed in the “Preferred Indications” column of Table 1D) in an amount effective to prevent, diagnose, treat, or ameliorate the disease or disorder. In another embodiment, the present invention also encompasses methods of preventing, diagnosing, treating, or ameliorating a disease or disorder related to one, two, three, or more, of the cells, tissues, and organs where the polynucleotide and/or polypeptide is expressed (for example, as indicated in Column 8 of Table 1B) or as indicated in the “Preferred Indications” column of Table 1D; comprising administering to a patient diagnostic or therapeutic molecules in combination with proteins, nucleic acids, or antibodies of the invention (or fragments or variants thereof) as represented by Table 1A.

[0017] The tissue distribution and homology to alpha-2 antiplasmin indicates that polynucleotides and polypeptides corresponding to this gene are useful for diagnosis and treatment of liver disorders, especially (but not limited to) hepatocellular tumors.

Features of Protein Encoded by Gene No: 2

[0018] The translation product of this gene shares sequence homology with alpha 2-antiplasmin, a serine protease inhibitor or serpin, which is thought to be important in preventing the destruction of fibrin clots that would otherwise be attacked by the serine protease plasmin.

[0019] This gene is expressed in a human cell line from hepatocellular carcinoma (i.e., a liver cancer).

[0020] Polynucleotides and polypeptides of the invention are useful as reagents for differential identification of the tissue(s) or cell type(s) present in a biological sample and for diagnosis of diseases and conditions which include but are not limited to: hepatocellular carcinoma (liver cancer). Similarly, polypeptides and antibodies directed to these polypeptides are useful in providing immunological probes for differential identification of the tissue(s) or cell type(s). For a number of disorders of the above tissues or cells, particularly of the liver, and especially cancerous liver tissue, expression of this gene at significantly higher or lower levels may be routinely detected in certain tissues or cell types (e.g., cancerous and wounded tissues) or bodily fluids (e.g., serum, plasma, urine, synovial fluid and spinal fluid) or another tissue or sample taken from an individual having such a disorder, relative to the standard gene expression level, i.e., the expression level in healthy tissue or bodily fluid from an individual not having the disorder.

[0021] Embodiments of the invention encompass using polynucleotides and polypeptides (including fragments and variants thereof, and also antibodies, agonists and antagonists thereof) to prevent, diagnose, treat, or ameliorate a disease or disorder. In preferred embodiments, the present invention encompasses a method of preventing, diagnosing, treating, or ameliorating a disease or disorder related to one, two, three, or more, of the cells, tissues, and organs where the polynucleotide and/or polypeptide is expressed (for example, as indicated in Column 8 of Table 1B) or as indicated in the “Preferred Indications” column of Table 1D; comprising administering to a patient in which such prevention, diagnosis, treatment, or amelioration is desired a protein, nucleic acid, or antibody of the invention (or fragment or variant thereof) represented by Table 1A (in the same row as the disease or disorder to be treated is listed in the “Preferred Indications” column of Table 1D) in an amount effective to prevent, diagnose, treat, or ameliorate the disease or disorder. In another embodiment, the present invention also encompasses methods of preventing, diagnosing, treating, or ameliorating a disease or disorder related to one, two, three, or more, of the cells, tissues, and organs where the polynucleotide and/or polypeptide is expressed (for example, as indicated in Column 8 of Table 1B) or as indicated in the “Preferred Indications” column of Table 1D; comprising administering to a patient diagnostic or therapeutic molecules in combination with proteins, nucleic acids, or antibodies of the invention (or fragments or variants thereof) as represented by Table 1A.

[0022] The tissue distribution and homology to serpins indicates that polynucleotides and polypeptides corresponding to this gene are useful for diagnosis and treatment of hepatocellular cancer.

Features of Protein Encoded by Gene No: 3

[0023] The translation product of this gene shares sequence homology with TSG-6 precursor, a member of the hyaluronate binding proteins (similar to the CD44 adhesion receptor) which is thought to be important in cell-cell adhesion, particularly during formation of tumors (Lee, T. H.; Wisniewski, H. G.; Vilcek, J., J. Cell Biol. (1992) 116:545-557).

[0024] Expression of this gene has been found in malignant esophagus tissue.

[0025] Polynucleotides and polypeptides of the invention are useful as reagents for differential identification of the tissue(s) or cell type(s) present in a biological sample and for diagnosis of diseases and conditions which include but are not limited to: esophageal cancer. Similarly, polypeptides and antibodies directed to these polypeptides are useful in providing immunological probes for differential identification of the tissue(s) or cell type(s). For a number of disorders of the above tissues or cells, particularly of the esophagus, expression of this gene at significantly higher or lower levels may be routinely detected in certain tissues or cell types (e.g., cancerous and wounded tissues) or bodily fluids (e.g., serum, plasma, urine, synovial fluid and spinal fluid) or another tissue or sample taken from an individual having such a disorder, relative to the standard gene expression level, i.e., the expression level in healthy tissue or bodily fluid from an individual not having the disorder.

[0026] Embodiments of the invention encompass using polynucleotides and polypeptides (including fragments and variants thereof, and also antibodies, agonists and antagonists thereof) to prevent, diagnose, treat, or ameliorate a disease or disorder. In preferred embodiments, the present invention encompasses a method of preventing, diagnosing, treating, or ameliorating a disease or disorder related to one, two, three, or more, of the cells, tissues, and organs where the polynucleotide and/or polypeptide is expressed (for example, as indicated in Column 8 of Table 1B) or as indicated in the “Preferred Indications” column of Table 1D; comprising administering to a patient in which such prevention, diagnosis, treatment, or amelioration is desired a protein, nucleic acid, or antibody of the invention (or fragment or variant thereof) represented by Table 1A (in the same row as the disease or disorder to be treated is listed in the “Preferred Indications” column of Table 1D) in an amount effective to prevent, diagnose, treat, or ameliorate the disease or disorder. In another embodiment, the present invention also encompasses methods of preventing, diagnosing, treating, or ameliorating a disease or disorder related to one, two, three, or more, of the cells, tissues, and organs where the polynucleotide and/or polypeptide is expressed (for example, as indicated in Column 8 of Table 1B) or as indicated in the “Preferred Indications” column of Table 1D; comprising administering to a patient diagnostic or therapeutic molecules in combination with proteins, nucleic acids, or antibodies of the invention (or fragments or variants thereof) as represented by Table 1A.

[0027] The tissue distribution and homology to a hyaluronate binding protein indicates that polynucleotides and polypeptides corresponding to this gene are useful for diagnosis and treatment of esophageal cancer.

Features of Protein Encoded by Gene No: 4

[0028] The translation product of this gene shares sequence homology with nine transmembrane domain-spanning proteins which have critical functions in cell signal transduction and as pores/channels or transporters in shuttling molecules across cell membranes.

[0029] This gene is expressed primarily in esophagus, disseminated adenocarcinoma, and dendritic cells.

[0030] Polynucleotides and polypeptides of the invention are useful as reagents for differential identification of the tissue(s) or cell type(s) present in a biological sample and for diagnosis of diseases and conditions which include but are not limited to: cancer and other proliferative disorders, particularly of the esophagus and immune system. Similarly, polypeptides and antibodies directed to these polypeptides are useful in providing immunological probes for differential identification of the tissue(s) or cell type(s). For a number of disorders of the above tissues or cells, particularly of the esophagus and immune system, expression of this gene at significantly higher or lower levels may be routinely detected in certain tissues or cell types (e.g., cancerous and wounded tissues) or bodily fluids (e.g., serum, plasma, urine, synovial fluid and spinal fluid) or another tissue or sample taken from an individual having such a disorder, relative to the standard gene expression level, i.e., the expression level in healthy tissue or bodily fluid from an individual not having the disorder.

[0031] Embodiments of the invention encompass using polynucleotides and polypeptides (including fragments and variants thereof, and also antibodies, agonists and antagonists thereof) to prevent, diagnose, treat, or ameliorate a disease or disorder. In preferred embodiments, the present invention encompasses a method of preventing, diagnosing, treating, or ameliorating a disease or disorder related to one, two, three, or more, of the cells, tissues, and organs where the polynucleotide and/or polypeptide is expressed (for example, as indicated in Column 8 of Table 1B) or as indicated in the “Preferred Indications” column of Table 1D; comprising administering to a patient in which such prevention, diagnosis, treatment, or amelioration is desired a protein, nucleic acid, or antibody of the invention (or fragment or variant thereof) represented by Table 1A (in the same row as the disease or disorder to be treated is listed in the “Preferred Indications” column of Table 1D) in an amount effective to prevent, diagnose, treat, or ameliorate the disease or disorder. In another embodiment, the present invention also encompasses methods of preventing, diagnosing, treating, or ameliorating a disease or disorder related to one, two, three, or more, of the cells, tissues, and organs where the polynucleotide and/or polypeptide is expressed (for example, as indicated in Column 8 of Table 1B) or as indicated in the “Preferred Indications” column of Table 1D; comprising administering to a patient diagnostic or therapeutic molecules in combination with proteins, nucleic acids, or antibodies of the invention (or fragments or variants thereof) as represented by Table 1A.

[0032] The tissue distribution and homology to the transmembrane 9 spanning proteins indicates that polynucleotides and polypeptides corresponding to this gene are useful for diagnosis and treatment of cancer and other proliferative disorders, particularly of the esophagus.

Features of Protein Encoded by Gene No: 5

[0033] The translation product of this gene shares sequence homology with cysteine-rich protease inhibitors.

[0034] This gene is expressed primarily in heart, adipose tissue (diabetic type II) #41661, and Soares pregnant uterus NbHPU.

[0035] Polynucleotides and polypeptides of the invention are useful as reagents for differential identification of the tissue(s) or cell type(s) present in a biological sample and for diagnosis of diseases and conditions which include but are not limited to diabetes, obesity, metabolic disorders, cardiovascular disorders, and reproductive disorders. Similarly, polypeptides and antibodies directed to these polypeptides are useful in providing immunological probes for differential identification of the tissue(s) or cell type(s). For a number of disorders of the above tissues or cells, particularly of the cardiovascular, gastrointestinal, and reproductive system, expression of this gene at significantly higher or lower levels may be routinely detected in certain tissues or cell types (e.g., cancerous and wounded tissues) or bodily fluids (e.g., serum, plasma, urine, synovial fluid and spinal fluid) or another tissue or sample taken from an individual having such a disorder, relative to the standard gene expression level, i.e., the expression level in healthy tissue or bodily fluid from an individual not having the disorder.

[0036] Embodiments of the invention encompass using polynucleotides and polypeptides (including fragments and variants thereof, and also antibodies, agonists and antagonists thereof) to prevent, diagnose, treat, or ameliorate a disease or disorder. In preferred embodiments, the present invention encompasses a method of preventing, diagnosing, treating, or ameliorating a disease or disorder related to one, two, three, or more, of the cells, tissues, and organs where the polynucleotide and/or polypeptide is expressed (for example, as indicated in Column 8 of Table 1B) or as indicated in the “Preferred Indications” column of Table 1D; comprising administering to a patient in which such prevention, diagnosis, treatment, or amelioration is desired a protein, nucleic acid, or antibody of the invention (or fragment or variant thereof) represented by Table 1A (in the same row as the disease or disorder to be treated is listed in the “Preferred Indications” column of Table 1D) in an amount effective to prevent, diagnose, treat, or ameliorate the disease or disorder. In another embodiment, the present invention also encompasses methods of preventing, diagnosing, treating, or ameliorating a disease or disorder related to one, two, three, or more, of the cells, tissues, and organs where the polynucleotide and/or polypeptide is expressed (for example, as indicated in Column 8 of Table 1B) or as indicated in the “Preferred Indications” column of Table 1D; comprising administering to a patient diagnostic or therapeutic molecules in combination with proteins, nucleic acids, or antibodies of the invention (or fragments or variants thereof) as represented by Table 1A.

[0037] The tissue distribution and homology to protease inhibitors indicates that polynucleotides and polypeptides corresponding to this gene are useful for diagnosis and treatment of diabetes, cardiovascular disorders, cancer and other proliferative disorders, particularly of the heart, adipose tissue, and female reproductive organs.

Features of Protein Encoded by Gene No: 6

[0038] The translation product of this gene shares sequence homology with amphiregulin, an epidermal like growth factor with tumor inhibitory associated activities.

[0039] This gene is expressed primarily in keratinocytes, colon tumor, rectum tumor, breast cancer and in AML patients.

[0040] Polynucleotides and polypeptides of the invention are useful as reagents for differential identification of the tissue(s) or cell type(s) present in a biological sample and for diagnosis of diseases and conditions which include but are not limited to: skin disorders, cancer and pulmonary disorders. Similarly, polypeptides and antibodies directed to these polypeptides are useful in providing immunological probes for differential identification of the tissue(s) or cell type(s). For a number of disorders of the above tissues or cells, particularly of the pulmonary systems and host surveillance and defense mechanisms, expression of this gene at significantly higher or lower levels may be routinely detected in certain tissues or cell types (e.g., cancerous and wounded tissues) or bodily fluids (e.g., serum, plasma, urine, synovial fluid and spinal fluid) or another tissue or sample taken from an individual having such a disorder, relative to the standard gene expression level, i.e., the expression level in healthy tissue or bodily fluid from an individual not having the disorder.

[0041] Embodiments of the invention encompass using polynucleotides and polypeptides (including fragments and variants thereof, and also antibodies, agonists and antagonists thereof) to prevent, diagnose, treat, or ameliorate a disease or disorder. In preferred embodiments, the present invention encompasses a method of preventing, diagnosing, treating, or ameliorating a disease or disorder related to one, two, three, or more, of the cells, tissues, and organs where the polynucleotide and/or polypeptide is expressed (for example, as indicated in Column 8 of Table 1B) or as indicated in the “Preferred Indications” column of Table 1D; comprising administering to a patient in which such prevention, diagnosis, treatment, or amelioration is desired a protein, nucleic acid, or antibody of the invention (or fragment or variant thereof) represented by Table 1A (in the same row as the disease or disorder to be treated is listed in the “Preferred Indications” column of Table 1D) in an amount effective to prevent, diagnose, treat, or ameliorate the disease or disorder. In another embodiment, the present invention also encompasses methods of preventing, diagnosing, treating, or ameliorating a disease or disorder related to one, two, three, or more, of the cells, tissues, and organs where the polynucleotide and/or polypeptide is expressed (for example, as indicated in Column 8 of Table 1B) or as indicated in the “Preferred Indications” column of Table 1D; comprising administering to a patient diagnostic or therapeutic molecules in combination with proteins, nucleic acids, or antibodies of the invention (or fragments or variants thereof) as represented by Table 1A.

[0042] The tissue distribution and homology to a growth factor with anti-tumor properties indicates that polynucleotides and polypeptides corresponding to this gene are useful for the treatment and/or detection of tumors including colon, lung, rectum and breast; skin disorders including melanoma, psoriasis and eczema; and pulmonary disorders in general including bronchitis and cystic fibrosis.

Features of Protein Encoded by Gene No: 7

[0043] The translation product of this gene shares sequence homology with pulmonary surfactant-associated protein A1 which is thought to be important in correct lung/alveolar function to maintain respiratory competence.

[0044] This gene is expressed primarily in lung and to a lesser extent in testis and olfactory epithelium

[0045] Polynucleotides and polypeptides of the invention are useful as reagents for differential identification of the tissue(s) or cell type(s) present in a biological sample and for diagnosis of diseases and conditions which include but are not limited to: lung cancer. Similarly, polypeptides and antibodies directed to these polypeptides are useful in providing immunological probes for differential identification of the tissue(s) or cell type(s). For a number of disorders of the above tissues or cells, particularly of the respiratory system, expression of this gene at significantly higher or lower levels may be routinely detected in certain tissues or cell types (e.g., cancerous and wounded tissues) or bodily fluids (e.g., serum, plasma, urine, synovial fluid and spinal fluid) or another tissue or sample taken from an individual having such a disorder, relative to the standard gene expression level, i.e., the expression level in healthy tissue or bodily fluid from an individual not having the disorder. Embodiments of the invention encompass using polynucleotides and polypeptides (including fragments and variants thereof, and also antibodies, agonists and antagonists thereof) to prevent, diagnose, treat, or ameliorate a disease or disorder. In preferred embodiments, the present invention encompasses a method of preventing, diagnosing, treating, or ameliorating a disease or disorder related to one, two, three, or more, of the cells, tissues, and organs where the polynucleotide and/or polypeptide is expressed (for example, as indicated in Column 8 of Table 1B) or as indicated in the “Preferred Indications” column of Table 1D; comprising administering to a patient in which such prevention, diagnosis, treatment, or amelioration is desired a protein, nucleic acid, or antibody of the invention (or fragment or variant thereof) represented by Table 1A (in the same row as the disease or disorder to be treated is listed in the “Preferred Indications” column of Table 1D) in an amount effective to prevent, diagnose, treat, or ameliorate the disease or disorder. In another embodiment, the present invention also encompasses methods of preventing, diagnosing, treating, or ameliorating a disease or disorder related to one, two, three, or more, of the cells, tissues, and organs where the polynucleotide and/or polypeptide is expressed (for example, as indicated in Column 8 of Table 1B) or as indicated in the “Preferred Indications” column of Table 1D; comprising administering to a patient diagnostic or therapeutic molecules in combination with proteins, nucleic acids, or antibodies of the invention (or fragments or variants thereof) as represented by Table 1A.

[0046] The tissue distribution and homology to pulmonary surfactant-associated protein A1 indicates that polynucleotides and polypeptides corresponding to this gene are useful for treatment and diagnosis of lung cancer and other lung diseases including asthma, COPD, bronchitis, lung fibrosis, cystic fibrosis, lung infections.

Features of Protein Encoded by Gene No: 8

[0047] The translation product of this gene shares sequence homology with pulmonary surfactant-associated protein A1 which is thought to be important in maintenance of lung/alveolar structure.

[0048] This gene is expressed primarily in lung and to a lesser extent in lung cancer.

[0049] Polynucleotides and polypeptides of the invention are useful as reagents for differential identification of the tissue(s) or cell type(s) present in a biological sample and for diagnosis of diseases and conditions which include but are not limited to: lung cancer. Similarly, polypeptides and antibodies directed to these polypeptides are useful in providing immunological probes for differential identification of the tissue(s) or cell type(s). For a number of disorders of the above tissues or cells, particularly of the bronchial/pulmonary system, expression of this gene at significantly higher or lower levels may be routinely detected in certain tissues or cell types (e.g., cancerous and wounded tissues) or bodily fluids (e.g., serum, plasma, urine, synovial fluid and spinal fluid) or another tissue or sample taken from an individual having such a disorder, relative to the standard gene expression level, i.e., the expression level in healthy tissue or bodily fluid from an individual not having the disorder.

[0050] Embodiments of the invention encompass using polynucleotides and polypeptides (including fragments and variants thereof, and also antibodies, agonists and antagonists thereof) to prevent, diagnose, treat, or ameliorate a disease or disorder. In preferred embodiments, the present invention encompasses a method of preventing, diagnosing, treating, or ameliorating a disease or disorder related to one, two, three, or more, of the cells, tissues, and organs where the polynucleotide and/or polypeptide is expressed (for example, as indicated in Column 8 of Table 1B) or as indicated in the “Preferred Indications” column of Table 1D; comprising administering to a patient in which such prevention, diagnosis, treatment, or amelioration is desired a protein, nucleic acid, or antibody of the invention (or fragment or variant thereof) represented by Table 1A (in the same row as the disease or disorder to be treated is listed in the “Preferred Indications” column of Table 1D) in an amount effective to prevent, diagnose, treat, or ameliorate the disease or disorder. In another embodiment, the present invention also encompasses methods of preventing, diagnosing, treating, or ameliorating a disease or disorder related to one, two, three, or more, of the cells, tissues, and organs where the polynucleotide and/or polypeptide is expressed (for example, as indicated in Column 8 of Table 1B) or as indicated in the “Preferred Indications” column of Table 1D; comprising administering to a patient diagnostic or therapeutic molecules in combination with proteins, nucleic acids, or antibodies of the invention (or fragments or variants thereof) as represented by Table 1A.

[0051] The tissue distribution and homology to pulmonary surfactant-associated protein A1 indicates that polynucleotides and polypeptides corresponding to this gene are useful for the treatment of numerous lung diseases including lung cancer, cystic fibrosis, asthma, COPD, pulmonary emphysema, lung fibrosis and lung infections including bronchitis.

[0052] Features of Protein Encoded by Gene No: 9

[0053] The translation product of this gene shares sequence homology with pancreatic elastase II, a protease, with a specificity for long-chain aliphatic or aromatic amino acids.

[0054] This gene is expressed exclusively in pancreatic tissue, both in tumors and normal pancreas.

[0055] Polynucleotides and polypeptides of the invention are useful as reagents for differential identification of the tissue(s) or cell type(s) present in a biological sample and for diagnosis of diseases and conditions which include but are not limited to: pancreatic cancer and other disorders of the pancreas (e.g. diabetes). Similarly, polypeptides and antibodies directed to these polypeptides are useful in providing immunological probes for differential identification of the tissue(s) or cell type(s). For a number of disorders of the above tissues or cells, particularly of the pancreas, expression of this gene at significantly higher or lower levels may be routinely detected in certain tissues or cell types (e.g., cancerous and wounded tissues) or bodily fluids (e.g., serum, plasma, urine, synovial fluid and spinal fluid) or another tissue or sample taken from an individual having such a disorder, relative to the standard gene expression level, i.e., the expression level in healthy tissue or bodily fluid from an individual not having the disorder.

[0056] Embodiments of the invention encompass using polynucleotides and polypeptides (including fragments and variants thereof, and also antibodies, agonists and antagonists thereof) to prevent, diagnose, treat, or ameliorate a disease or disorder. In preferred embodiments, the present invention encompasses a method of preventing, diagnosing, treating, or ameliorating a disease or disorder related to one, two, three, or more, of the cells, tissues, and organs where the polynucleotide and/or polypeptide is expressed (for example, as indicated in Column 8 of Table 1B) or as indicated in the “Preferred Indications” column of Table 1D; comprising administering to a patient in which such prevention, diagnosis, treatment, or amelioration is desired a protein, nucleic acid, or antibody of the invention (or fragment or variant thereof) represented by Table 1A (in the same row as the disease or disorder to be treated is listed in the “Preferred Indications” column of Table 1D) in an amount effective to prevent, diagnose, treat, or ameliorate the disease or disorder. In another embodiment, the present invention also encompasses methods of preventing, diagnosing, treating, or ameliorating a disease or disorder related to one, two, three, or more, of the cells, tissues, and organs where the polynucleotide and/or polypeptide is expressed (for example, as indicated in Column 8 of Table 1B) or as indicated in the “Preferred Indications” column of Table 1D; comprising administering to a patient diagnostic or therapeutic molecules in combination with proteins, nucleic acids, or antibodies of the invention (or fragments or variants thereof) as represented by Table 1A.

[0057] The tissue distribution and homology to pancreatic elastase II indicates that polynucleotides and polypeptides corresponding to this gene are useful for diagnosis and treatment of cancer and other proliferative disorders of the pancreas.

Features of Protein Encoded by Gene No: 10

[0058] The translation product of this gene shares sequence homology with extracellular superoxide dismutase (SOD3) which is thought to be important in controlling oxidation of serum proteins.

[0059] This gene is expressed primarily in esophageal cancer and to a lesser extent in brain, pancreas and lung. This protein is found in plasma, lymph, and synovial fluid as well as in tissues.

[0060] Polynucleotides and polypeptides of the invention are useful as reagents for differential identification of the tissue(s) or cell type(s) present in a biological sample and for diagnosis of diseases and conditions which include but are not limited to: esophageal cancer and atherosclerosis. Similarly, polypeptides and antibodies directed to these polypeptides are useful in providing immunological probes for differential identification of the tissue(s) or cell type(s). For a number of disorders of the above tissues or cells, particularly of the lung and pancreas, expression of this gene at significantly higher or lower levels may be routinely detected in certain tissues or cell types (e.g., cancerous and wounded tissues) or bodily fluids (e.g., serum, plasma, urine, synovial fluid and spinal fluid) or another tissue or sample taken from an individual having such a disorder, relative to the standard gene expression level, i.e., the expression level in healthy tissue or bodily fluid from an individual not having the disorder.

[0061] Embodiments of the invention encompass using polynucleotides and polypeptides (including fragments and variants thereof, and also antibodies, agonists and antagonists thereof) to prevent, diagnose, treat, or ameliorate a disease or disorder. In preferred embodiments, the present invention encompasses a method of preventing, diagnosing, treating, or ameliorating a disease or disorder related to one, two, three, or more, of the cells, tissues, and organs where the polynucleotide and/or polypeptide is expressed (for example, as indicated in Column 8 of Table 1B) or as indicated in the “Preferred Indications” column of Table 1D; comprising administering to a patient in which such prevention, diagnosis, treatment, or amelioration is desired a protein, nucleic acid, or antibody of the invention (or fragment or variant thereof) represented by Table 1A (in the same row as the disease or disorder to be treated is listed in the “Preferred Indications” column of Table 1D) in an amount effective to prevent, diagnose, treat, or ameliorate the disease or disorder. In another embodiment, the present invention also encompasses methods of preventing, diagnosing, treating, or ameliorating a disease or disorder related to one, two, three, or more, of the cells, tissues, and organs where the polynucleotide and/or polypeptide is expressed (for example, as indicated in Column 8 of Table 1B) or as indicated in the “Preferred Indications” column of Table 1D; comprising administering to a patient diagnostic or therapeutic molecules in combination with proteins, nucleic acids, or antibodies of the invention (or fragments or variants thereof) as represented by Table 1A.

[0062] The tissue distribution and homology to Extracellular superoxide dismutase found in the serum indicates that polynucleotides and polypeptides corresponding to this gene are useful for treatment of esophageal cancer, atherosclerotic disease, and diseases where anti-oxidant therapy may be useful.

Features of Protein Encoded by Gene No: 11

[0063] The translation product of this gene shares sequence homology with Quiescin Q6 (a new member of a conserved gene family) with a potential role in human cancer via control of growth mediated in part at the level of the transition by cells into and out of quiescence (GO).

[0064] This gene is expressed primarily in esophageal cancer and lung.

[0065] Polynucleotides and polypeptides of the invention are useful as reagents for differential identification of the tissue(s) or cell type(s) present in a biological sample and for diagnosis of diseases and conditions which include but are not limited to: esophageal, lung, and other cancers. Similarly, polypeptides and antibodies directed to these polypeptides are useful in providing immunological probes for differential identification of the tissue(s) or cell type(s). For a number of disorders of the above tissues or cells, particularly of the lung, bronchea, and esophagus expression of this gene at significantly higher or lower levels may be routinely detected in certain tissues or cell types (e.g., cancerous and wounded tissues) or bodily fluids (e.g., serum, plasma, urine, synovial fluid and spinal fluid) or another tissue or sample taken from an individual having such a disorder, relative to the standard gene expression level, i.e., the expression level in healthy tissue or bodily fluid from an individual not having the disorder.

[0066] Embodiments of the invention encompass using polynucleotides and polypeptides (including fragments and variants thereof, and also antibodies, agonists and antagonists thereof) to prevent, diagnose, treat, or ameliorate a disease or disorder. In preferred embodiments, the present invention encompasses a method of preventing, diagnosing, treating, or ameliorating a disease or disorder related to one, two, three, or more, of the cells, tissues, and organs where the polynucleotide and/or polypeptide is expressed (for example, as indicated in Column 8 of Table 1B) or as indicated in the “Preferred Indications” column of Table 1D; comprising administering to a patient in which such prevention, diagnosis, treatment, or amelioration is desired a protein, nucleic acid, or antibody of the invention (or fragment or variant thereof) represented by Table 1A (in the same row as the disease or disorder to be treated is listed in the “Preferred Indications” column of Table 1D) in an amount effective to prevent, diagnose, treat, or ameliorate the disease or disorder. In another embodiment, the present invention also encompasses methods of preventing, diagnosing, treating, or ameliorating a disease or disorder related to one, two, three, or more, of the cells, tissues, and organs where the polynucleotide and/or polypeptide is expressed (for example, as indicated in Column 8 of Table 1B) or as indicated in the “Preferred Indications” column of Table 1D; comprising administering to a patient diagnostic or therapeutic molecules in combination with proteins, nucleic acids, or antibodies of the invention (or fragments or variants thereof) as represented by Table 1A.

[0067] The tissue distribution and homology to Quiescin Q6 indicates that polynucleotides and polypeptides corresponding to this gene are useful in treating lung cancer and cancer of the esophagus.

[0068] Features of Protein Encoded by Gene No: 12

[0069] The translation product of this gene shares sequence homology with Apolipoprotein D (Apo-D) a component of high density lipoprotein that has no marked similarity to other apolipoprotein sequences. It has a high degree of homology to plasma retinol-binding protein and other members of the alpha 2 microglobulin protein superfamily of carrier proteins, also known as lipocalins. It is a glycoprotein of estimated molecular weight 33 kDa Apo-D is closely associated with the enzyme lecithin:cholesterol acyltransferase—an enzyme involved in lipoprotein metabolism.

[0070] This gene is expressed primarily in apocrine glands and to a lesser extent in Esophagus, Disseminated adenocarcinoma.

[0071] Polynucleotides and polypeptides of the invention are useful as reagents for differential identification of the tissue(s) or cell type(s) present in a biological sample and for diagnosis of diseases and conditions which include but are not limited to: cancer (particularly adenocarcinomas and esophageal cancer), blood disorders, atherosclerosis, uterine disorders. Similarly, polypeptides and antibodies directed to these polypeptides are useful in providing immunological probes for differential identification of the tissue(s) or cell type(s). For a number of disorders of the above tissues or cells, particularly of the digestive, reproductive, and hematopoietic system, expression of this gene at significantly higher or lower levels may be routinely detected in certain tissues or cell types (e.g., cancerous and wounded tissues) or bodily fluids (e.g., serum, plasma, urine, synovial fluid and spinal fluid) or another tissue or sample taken from an individual having such a disorder, relative to the standard gene expression level, i.e., the expression level in healthy tissue or bodily fluid from an individual not having the disorder. Embodiments of the invention encompass using polynucleotides and polypeptides (including fragments and variants thereof, and also antibodies, agonists and antagonists thereof) to prevent, diagnose, treat, or ameliorate a disease or disorder. In preferred embodiments, the present invention encompasses a method of preventing, diagnosing, treating, or ameliorating a disease or disorder related to one, two, three, or more, of the cells, tissues, and organs where the polynucleotide and/or polypeptide is expressed (for example, as indicated in Column 8 of Table 1B) or as indicated in the “Preferred Indications” column of Table 1D; comprising administering to a patient in which such prevention, diagnosis, treatment, or amelioration is desired a protein, nucleic acid, or antibody of the invention (or fragment or variant thereof) represented by Table 1A (in the same row as the disease or disorder to be treated is listed in the “Preferred Indications” column of Table 1D) in an amount effective to prevent, diagnose, treat, or ameliorate the disease or disorder. In another embodiment, the present invention also encompasses methods of preventing, diagnosing, treating, or ameliorating a disease or disorder related to one, two, three, or more, of the cells, tissues, and organs where the polynucleotide and/or polypeptide is expressed (for example, as indicated in Column 8 of Table 1B) or as indicated in the “Preferred Indications” column of Table 1D; comprising administering to a patient diagnostic or therapeutic molecules in combination with proteins, nucleic acids, or antibodies of the invention (or fragments or variants thereof) as represented by Table 1A.

[0072] The tissue distribution and homology to apolipoprotein D and pocrine secretion odor-binding proteins 1 and 2 indicates that polynucleotides and polypeptides corresponding to this gene are useful for development of pheromones to control human behavior or in the treatment of diseases of the blood and vascular system.

[0073] Features of Protein Encoded by Gene No: 13

[0074] The translation product of this gene shares sequence homology with pulmonary surfactant apoprotein which is thought to be important in maintaining lung function for respiration.

[0075] This gene is expressed primarily in lung cancer.

[0076] Polynucleotides and polypeptides of the invention are useful as reagents for differential identification of the tissue(s) or cell type(s) present in a biological sample and for diagnosis of diseases and conditions which include but are not limited to: lung cancer. Similarly, polypeptides and antibodies directed to these polypeptides are useful in providing immunological probes for differential identification of the tissue(s) or cell type(s). For a number of disorders of the above tissues or cells, particularly of the pulmonary system, expression of this gene at significantly higher or lower levels may be routinely detected in certain tissues or cell types (e.g., cancerous and wounded tissues) or bodily fluids (e.g., serum, plasma, urine, synovial fluid and spinal fluid) or another tissue or sample taken from an individual having such a disorder, relative to the standard gene expression level, i.e., the expression level in healthy tissue or bodily fluid from an individual not having the disorder.

[0077] Embodiments of the invention encompass using polynucleotides and polypeptides (including fragments and variants thereof, and also antibodies, agonists and antagonists thereof) to prevent, diagnose, treat, or ameliorate a disease or disorder. In preferred embodiments, the present invention encompasses a method of preventing, diagnosing, treating, or ameliorating a disease or disorder related to one, two, three, or more, of the cells, tissues, and organs where the polynucleotide and/or polypeptide is expressed (for example, as indicated in Column 8 of Table 1B) or as indicated in the “Preferred Indications” column of Table 1D; comprising administering to a patient in which such prevention, diagnosis, treatment, or amelioration is desired a protein, nucleic acid, or antibody of the invention (or fragment or variant thereof) represented by Table 1A (in the same row as the disease or disorder to be treated is listed in the “Preferred Indications” column of Table 1D) in an amount effective to prevent, diagnose, treat, or ameliorate the disease or disorder. In another embodiment, the present invention also encompasses methods of preventing, diagnosing, treating, or ameliorating a disease or disorder related to one, two, three, or more, of the cells, tissues, and organs where the polynucleotide and/or polypeptide is expressed (for example, as indicated in Column 8 of Table 1B) or as indicated in the “Preferred Indications” column of Table 1D; comprising administering to a patient diagnostic or therapeutic molecules in combination with proteins, nucleic acids, or antibodies of the invention (or fragments or variants thereof) as represented by Table 1A.

[0078] The lung cancer tissue distribution and homology to lung surfactant protein indicates that polynucleotides and polypeptides corresponding to this gene are useful for the diagnosis and treatment of lung diseases, especially lung cancer, where the protein may be used to detect and treat distant metastatic lung cancer lesions, or alternately the protein could be used for the development of a blood test in order to monitor for the growth/recurrence of lung carcinoma. Alternately, the nucleotide sequence and its encoded polypeptides may be useful for the treatment of other pulmonary diseases including asthma, Chronic Obstructive Pulmonary Disease (COPD), Emphysema, Cystic fibrosis, and lung infections.

[0079] Features of Protein Encoded by Gene No: 14

[0080] Expression of this gene has been found in malignant esophageal tissue.

[0081] Polynucleotides and polypeptides of the invention are useful as reagents for differential identification of the tissue(s) or cell type(s) present in a biological sample and for diagnosis of diseases and conditions which include but are not limited to: esophageal cancer. Similarly, polypeptides and antibodies directed to these polypeptides are useful in providing immunological probes for differential identification of the tissue(s) or cell type(s). For a number of disorders of the above tissues or cells, particularly of the esophagus, expression of this gene at significantly higher or lower levels may be routinely detected in certain tissues or cell types (e.g., cancerous and wounded tissues) or bodily fluids (e.g., serum, plasma, urine, synovial fluid and spinal fluid) or another tissue or sample taken from an individual having such a disorder, relative to the standard gene expression level, i.e., the expression level in healthy tissue or bodily fluid from an individual not having the disorder.

[0082] Embodiments of the invention encompass using polynucleotides and polypeptides (including fragments and variants thereof, and also antibodies, agonists and antagonists thereof) to prevent, diagnose, treat, or ameliorate a disease or disorder. In preferred embodiments, the present invention encompasses a method of preventing, diagnosing, treating, or ameliorating a disease or disorder related to one, two, three, or more, of the cells, tissues, and organs where the polynucleotide and/or polypeptide is expressed (for example, as indicated in Column 8 of Table 1B) or as indicated in the “Preferred Indications” column of Table 1D; comprising administering to a patient in which such prevention, diagnosis, treatment, or amelioration is desired a protein, nucleic acid, or antibody of the invention (or fragment or variant thereof) represented by Table 1A (in the same row as the disease or disorder to be treated is listed in the “Preferred Indications” column of Table 1D) in an amount effective to prevent, diagnose, treat, or ameliorate the disease or disorder. In another embodiment, the present invention also encompasses methods of preventing, diagnosing, treating, or ameliorating a disease or disorder related to one, two, three, or more, of the cells, tissues, and organs where the polynucleotide and/or polypeptide is expressed (for example, as indicated in Column 8 of Table 1B) or as indicated in the “Preferred Indications” column of Table 1D; comprising administering to a patient diagnostic or therapeutic molecules in combination with proteins, nucleic acids, or antibodies of the invention (or fragments or variants thereof) as represented by Table 1A.

[0083] The tissue distribution indicates that polynucleotides and polypeptides corresponding to this gene are useful for diagnosis and treatment of malignant tumors of the esophagus.

[0084] Features of Protein Encoded by Gene No: 15

[0085] The translation product of this gene shares sequence homology with complement subcomponent C1q chain C precursor. C1Q associates with the proenzymes c1r and c1s to yield c1, the first component of the serum complement system. The collagen-like regions of c1q interact with the Ca²⁺-dependent c1r(2)c1s(2) proenzyme complex, and efficient activation of c1 takes place on interaction of the globular heads of c1q with the fc regions of Igg or Igm antibody present in immune complexes.

[0086] This gene is expressed primarily in immune/hematopoietic tissues, and to a lesser extent in digestive, reproductive, neural/sensory, musculoskeletal tissues.

[0087] Polynucleotides and polypeptides of the invention are useful as reagents for differential identification of the tissue(s) or cell type(s) present in a biological sample and for diagnosis of diseases and conditions which include but are not limited to: disorders in immune/hematopoietic systems. Similarly, polypeptides and antibodies directed to these polypeptides are useful in providing immunological probes for differential identification of the tissue(s) or cell type(s). For a number of disorders of the above tissues or cells, particularly of the immune/hematopoietic, expression of this gene at significantly higher or lower levels may be routinely detected in certain tissues or cell types (e.g., cancerous and wounded tissues) or bodily fluids (e.g., serum, plasma, urine, synovial fluid and spinal fluid) or another tissue or sample taken from an individual having such a disorder, relative to the standard gene expression level, i.e., the expression level in healthy tissue or bodily fluid from an individual not having the disorder.

[0088] Embodiments of the invention encompass using polynucleotides and polypeptides (including fragments and variants thereof, and also antibodies, agonists and antagonists thereof) to prevent, diagnose, treat, or ameliorate a disease or disorder. In preferred embodiments, the present invention encompasses a method of preventing, diagnosing, treating, or ameliorating a disease or disorder related to one, two, three, or more, of the cells, tissues, and organs where the polynucleotide and/or polypeptide is expressed (for example, as indicated in Column 8 of Table 1B) or as indicated in the “Preferred Indications” column of Table 1D; comprising administering to a patient in which such prevention, diagnosis, treatment, or amelioration is desired a protein, nucleic acid, or antibody of the invention (or fragment or variant thereof) represented by Table 1A (in the same row as the disease or disorder to be treated is listed in the “Preferred Indications” column of Table 1D) in an amount effective to prevent, diagnose, treat, or ameliorate the disease or disorder. In another embodiment, the present invention also encompasses methods of preventing, diagnosing, treating, or ameliorating a disease or disorder related to one, two, three, or more, of the cells, tissues, and organs where the polynucleotide and/or polypeptide is expressed (for example, as indicated in Column 8 of Table 1B) or as indicated in the “Preferred Indications” column of Table 1D; comprising administering to a patient diagnostic or therapeutic molecules in combination with proteins, nucleic acids, or antibodies of the invention (or fragments or variants thereof) as represented by Table 1A.

[0089] The tissue distribution and homology to complement subcomponent C1q chain C precursor indicates that polynucleotides and polypeptides corresponding to this gene are useful for diagnosis and/or treatment of disorders in immune/hematopoietic systems.

[0090] Features of Protein Encoded by Gene No: 16

[0091] This gene is expressed primarily in tumors including pancreas, ovarian, colon, kidney and prostate tumors.

[0092] Polynucleotides and polypeptides of the invention are useful as reagents for differential identification of the tissue(s) or cell type(s) present in a biological sample and for diagnosis of diseases and conditions which include but are not limited to: treatment and/or detection of solid tumors. Similarly, polypeptides and antibodies directed to these polypeptides are useful in providing immunological probes for differential identification of the tissue(s) or cell type(s). For a number of disorders of the above tissues or cells, particularly of the digestive, reproductive and renal systems, expression of this gene at significantly higher or lower levels may be routinely detected in certain tissues or cell types (e.g., cancerous and wounded tissues) or bodily fluids (e.g., serum, plasma, urine, synovial fluid and spinal fluid) or another tissue or sample taken from an individual having such a disorder, relative to the standard gene expression level, i.e., the expression level in healthy tissue or bodily fluid from an individual not having the disorder.

[0093] Embodiments of the invention encompass using polynucleotides and polypeptides (including fragments and variants thereof, and also antibodies, agonists and antagonists thereof) to prevent, diagnose, treat, or ameliorate a disease or disorder. In preferred embodiments, the present invention encompasses a method of preventing, diagnosing, treating, or ameliorating a disease or disorder related to one, two, three, or more, of the cells, tissues, and organs where the polynucleotide and/or polypeptide is expressed (for example, as indicated in Column 8 of Table 1B) or as indicated in the “Preferred Indications” column of Table 1D; comprising administering to a patient in which such prevention, diagnosis, treatment, or amelioration is desired a protein, nucleic acid, or antibody of the invention (or fragment or variant thereof) represented by Table 1A (in the same row as the disease or disorder to be treated is listed in the “Preferred Indications” column of Table 1D) in an amount effective to prevent, diagnose, treat, or ameliorate the disease or disorder. In another embodiment, the present invention also encompasses methods of preventing, diagnosing, treating, or ameliorating a disease or disorder related to one, two, three, or more, of the cells, tissues, and organs where the polynucleotide and/or polypeptide is expressed (for example, as indicated in Column 8 of Table 1B) or as indicated in the “Preferred Indications” column of Table 1D; comprising administering to a patient diagnostic or therapeutic molecules in combination with proteins, nucleic acids, or antibodies of the invention (or fragments or variants thereof) as represented by Table 1A.

[0094] The tissue distribution in tumor cell types indicates that polynucleotides and polypeptides corresponding to this gene are useful for the treatment and/or detection of prostate, pancreatic, ovarian, colon kidney cancer and other solid tumors. In addition considering expression in prostate cancer, the encoded protein could be used a detection and/or treatment of prostate disorders including benign prostate hyperplasia and associated urinary tract symptoms.

[0095] Features of Protein Encoded by Gene No: 17

[0096] This gene is expressed primarily in cancerous tissues of the colon, liver, breast (mammary glands), and prostate.

[0097] Polynucleotides and polypeptides of the invention are useful as reagents for differential identification of the tissue(s) or cell type(s) present in a biological sample and for diagnosis of diseases and conditions which include but are not limited to colon cancer, liver cancer, breast cancer, and prostate cancer. Similarly, polypeptides and antibodies directed to these polypeptides are useful in providing immunological probes for differential identification of the tissue(s) or cell type(s). For a number of disorders of the above tissues or cells, particularly of the gastrointestinal system, hepatic system, mammary glands and prostate, expression of this gene at significantly higher or lower levels may be routinely detected in certain tissues or cell types (e.g., cancerous and wounded tissues) or bodily fluids (e.g., serum, plasma, urine, synovial fluid and spinal fluid) or another tissue or sample taken from an individual having such a disorder, relative to the standard gene expression level, i.e., the expression level in healthy tissue or bodily fluid from an individual not having the disorder. Embodiments of the invention encompass using polynucleotides and polypeptides (including fragments and variants thereof, and also antibodies, agonists and antagonists thereof) to prevent, diagnose, treat, or ameliorate a disease or disorder. In preferred embodiments, the present invention encompasses a method of preventing, diagnosing, treating, or ameliorating a disease or disorder related to one, two, three, or more, of the cells, tissues, and organs where the polynucleotide and/or polypeptide is expressed (for example, as indicated in Column 8 of Table 1B) or as indicated in the “Preferred Indications” column of Table 1D; comprising administering to a patient in which such prevention, diagnosis, treatment, or amelioration is desired a protein, nucleic acid, or antibody of the invention (or fragment or variant thereof) represented by Table 1A (in the same row as the disease or disorder to be treated is listed in the “Preferred Indications” column of Table 1D) in an amount effective to prevent, diagnose, treat, or ameliorate the disease or disorder. In another embodiment, the present invention also encompasses methods of preventing, diagnosing, treating, or ameliorating a disease or disorder related to one, two, three, or more, of the cells, tissues, and organs where the polynucleotide and/or polypeptide is expressed (for example, as indicated in Column 8 of Table 1B) or as indicated in the “Preferred Indications” column of Table 1D; comprising administering to a patient diagnostic or therapeutic molecules in combination with proteins, nucleic acids, or antibodies of the invention (or fragments or variants thereof) as represented by Table 1A.

[0098] The tissue distribution indicates that polynucleotides and polypeptides corresponding to this gene are useful for the treatment and/or detection of solid tumors including colon, liver, breast and prostate cancer, and benign prostate hyperplasia.

[0099] Features of Protein Encoded by Gene No: 18

[0100] This gene is expressed primarily in T-Cells treated with PHA (16 hrs) and in malignant esophageal tissue.

[0101] Polynucleotides and polypeptides of the invention are useful as reagents for differential identification of the tissue(s) or cell type(s) present in a biological sample and for diagnosis of diseases and conditions which include but are not limited to immune disorders (particularly those involving activated T-cells) cancer and other proliferative disorders (particularly of the esophagus). Similarly, polypeptides and antibodies directed to these polypeptides are useful in providing immunological probes for differential identification of the tissue(s) or cell type(s). For a number of disorders of the above tissues or cells, particularly of the immune system and esophagus, expression of this gene at significantly higher or lower levels may be routinely detected in certain tissues or cell types (e.g., cancerous and wounded tissues) or bodily fluids (e.g., serum, plasma, urine, synovial fluid and spinal fluid) or another tissue or sample taken from an individual having such a disorder, relative to the standard gene expression level, i.e., the expression level in healthy tissue or bodily fluid from an individual not having the disorder.

[0102] Embodiments of the invention encompass using polynucleotides and polypeptides (including fragments and variants thereof, and also antibodies, agonists and antagonists thereof) to prevent, diagnose, treat, or ameliorate a disease or disorder. In preferred embodiments, the present invention encompasses a method of preventing, diagnosing, treating, or ameliorating a disease or disorder related to one, two, three, or more, of the cells, tissues, and organs where the polynucleotide and/or polypeptide is expressed (for example, as indicated in Column 8 of Table 1B) or as indicated in the “Preferred Indications” column of Table 1D; comprising administering to a patient in which such prevention, diagnosis, treatment, or amelioration is desired a protein, nucleic acid, or antibody of the invention (or fragment or variant thereof) represented by Table 1A (in the same row as the disease or disorder to be treated is listed in the “Preferred Indications” column of Table 1D) in an amount effective to prevent, diagnose, treat, or ameliorate the disease or disorder. In another embodiment, the present invention also encompasses methods of preventing, diagnosing, treating, or ameliorating a disease or disorder related to one, two, three, or more, of the cells, tissues, and organs where the polynucleotide and/or polypeptide is expressed (for example, as indicated in Column 8 of Table 1B) or as indicated in the “Preferred Indications” column of Table 1D; comprising administering to a patient diagnostic or therapeutic molecules in combination with proteins, nucleic acids, or antibodies of the invention (or fragments or variants thereof) as represented by Table 1A.

[0103] The tissue distribution indicates that polynucleotides and polypeptides corresponding to this gene are useful for diagnosis and treatment of immune disorders, cancer and other proliferative disorders, particularly disorders involving T-cells and esophageal cancer.

[0104] Features of Protein Encoded by Gene No: 19

[0105] This gene is expressed primarily in breast, testes and lung tumors.

[0106] Polynucleotides and polypeptides of the invention are useful as reagents for differential identification of the tissue(s) or cell type(s) present in a biological sample and for diagnosis of diseases and conditions which include but are not limited to: lung, breast and testicular cancer. Similarly, polypeptides and antibodies directed to these polypeptides are useful in providing immunological probes for differential identification of the tissue(s) or cell type(s). For a number of disorders of the above tissues or cells, particularly of the reproductive systems and pulmonary systems, expression of this gene at significantly higher or lower levels may be routinely detected in certain tissues or cell types (e.g., cancerous and wounded tissues) or bodily fluids (e.g., serum, plasma, urine, synovial fluid and spinal fluid) or another tissue or sample taken from an individual having such a disorder, relative to the standard gene expression level, i.e., the expression level in healthy tissue or bodily fluid from an individual not having the disorder.

[0107] Embodiments of the invention encompass using polynucleotides and polypeptides (including fragments and variants thereof, and also antibodies, agonists and antagonists thereof) to prevent, diagnose, treat, or ameliorate a disease or disorder. In preferred embodiments, the present invention encompasses a method of preventing, diagnosing, treating, or ameliorating a disease or disorder related to one, two, three, or more, of the cells, tissues, and organs where the polynucleotide and/or polypeptide is expressed (for example, as indicated in Column 8 of Table 1B) or as indicated in the “Preferred Indications” column of Table 1D; comprising administering to a patient in which such prevention, diagnosis, treatment, or amelioration is desired a protein, nucleic acid, or antibody of the invention (or fragment or variant thereof) represented by Table 1A (in the same row as the disease or disorder to be treated is listed in the “Preferred Indications” column of Table 1D) in an amount effective to prevent, diagnose, treat, or ameliorate the disease or disorder. In another embodiment, the present invention also encompasses methods of preventing, diagnosing, treating, or ameliorating a disease or disorder related to one, two, three, or more, of the cells, tissues, and organs where the polynucleotide and/or polypeptide is expressed (for example, as indicated in Column 8 of Table 1B) or as indicated in the “Preferred Indications” column of Table 1D; comprising administering to a patient diagnostic or therapeutic molecules in combination with proteins, nucleic acids, or antibodies of the invention (or fragments or variants thereof) as represented by Table 1A.

[0108] The tissue distribution indicates that polynucleotides and polypeptides corresponding to this gene are useful for the treatment and/or detection of breast cancer, testicular cancer, lung cancer, and in addition other lung disorders including cystic fibrosis, chronic obstructive pulmonary disease, asthma, pulmonary fibrosis, edema, embolism, and acute lung injury.

[0109] Features of Protein Encoded by Gene No: 20

[0110] This gene is expressed in most cell and tissue types with enriched expression in immune cell populations, colon and ovarian tumors. Expression is also observed to a lesser degree in lung cancer tissue.

[0111] Polynucleotides and polypeptides of the invention are useful as reagents for differential identification of the tissue(s) or cell type(s) present in a biological sample and for diagnosis of diseases and conditions which include but are not limited to: immune disorders, colon, ovarian and lung cancer. Similarly, polypeptides and antibodies directed to these polypeptides are useful in providing immunological probes for differential identification of the tissue(s) or cell type(s). For a number of disorders of the above tissues or cells, particularly of the immune, digestive, female reproductive and pulmonary systems, expression of this gene at significantly higher or lower levels may be routinely detected in certain tissues or cell types (e.g., cancerous and wounded tissues) or bodily fluids (e.g., serum, plasma, urine, synovial fluid and spinal fluid) or another tissue or sample taken from an individual having such a disorder, relative to the standard gene expression level, i.e., the expression level in healthy tissue or bodily fluid from an individual not having the disorder.

[0112] Embodiments of the invention encompass using polynucleotides and polypeptides (including fragments and variants thereof, and also antibodies, agonists and antagonists thereof) to prevent, diagnose, treat, or ameliorate a disease or disorder. In preferred embodiments, the present invention encompasses a method of preventing, diagnosing, treating, or ameliorating a disease or disorder related to one, two, three, or more, of the cells, tissues, and organs where the polynucleotide and/or polypeptide is expressed (for example, as indicated in Column 8 of Table 1B) or as indicated in the “Preferred Indications” column of Table 1D; comprising administering to a patient, in which such prevention, diagnosis, treatment, or amelioration is desired, a protein, nucleic acid, or antibody of the invention (or fragment or variant thereof) represented by Table 1A (in the same row as the disease or disorder to be treated is listed in the “Preferred Indications” column of Table 1D) in an amount effective to prevent, diagnose, treat, or ameliorate the disease or disorder. In another embodiment, the present invention also encompasses methods of preventing, diagnosing, treating, or ameliorating a disease or disorder related to one, two, three, or more, of the cells, tissues, and organs where the polynucleotide and/or polypeptide is expressed (for example, as indicated in Column 8 of Table 1B) or as indicated in the “Preferred Indications” column of Table 1D; comprising administering to a patient diagnostic or therapeutic molecules in combination with proteins, nucleic acids, or antibodies of the invention (or fragments or variants thereof) as represented by Table 1A.

[0113] The tissue distribution indicates that polynucleotides and polypeptides corresponding to this gene are useful for the treatment and/or detection of immune disorders such as asthma, rheumatoid arthritis, immunodeficiencies; colon, ovarian and lung tumors and pulmonary disorders such as cystic fibrosis, chronic obstructive pulmonary disease, asthma, pulmonary fibrosis, edema, embolism, and acute lung injury.

[0114] Features of Protein Encoded by Gene No: 21

[0115] The translation product of this gene shares sequence homology with Transmembrane 9 superfamily protein member 2 which is thought to be important in transport of compounds across cell membranes as structurally similar proteins have been found to act as channels and/or transporters.

[0116] This gene is expressed primarily in liver tumor, GKC, Uterus, and GM-CSF treated Mo7e cell line, and to a lesser extent in other tissues such as pancreas.

[0117] Polynucleotides and polypeptides of the invention are useful as reagents for differential identification of the tissue(s) or cell type(s) present in a biological sample and for diagnosis of diseases and conditions which include but are not limited to: liver and pancreatic cancer. Similarly, polypeptides and antibodies directed to these polypeptides are useful in providing immunological probes for differential identification of the tissue(s) or cell type(s). For a number of disorders of the above tissues or cells, particularly of the liver and pancreas, expression of this gene at significantly higher or lower levels may be routinely detected in certain tissues or cell types (e.g., cancerous and wounded tissues) or bodily fluids (e.g., serum, plasma, urine, synovial fluid and spinal fluid) or another tissue or sample taken from an individual having such a disorder, relative to the standard gene expression level, i.e., the expression level in healthy tissue or bodily fluid from an individual not having the disorder.

[0118] Embodiments of the invention encompass using polynucleotides and polypeptides (including fragments and variants thereof, and also antibodies, agonists and antagonists thereof) to prevent, diagnose, treat, or ameliorate a disease or disorder. In preferred embodiments, the present invention encompasses a method of preventing, diagnosing, treating, or ameliorating a disease or disorder related to one, two, three, or more, of the cells, tissues, and organs where the polynucleotide and/or polypeptide is expressed (for example, as indicated in Column 8 of Table 1B) or as indicated in the “Preferred Indications” column of Table 1D; comprising administering to a patient in which such prevention, diagnosis, treatment, or amelioration is desired a protein, nucleic acid, or antibody of the invention (or fragment or variant thereof) represented by Table 1A (in the same row as the disease or disorder to be treated is listed in the “Preferred Indications” column of Table 1D) in an amount effective to prevent, diagnose, treat, or ameliorate the disease or disorder. In another embodiment, the present invention also encompasses methods of preventing, diagnosing, treating, or ameliorating a disease or disorder related to one, two, three, or more, of the cells, tissues, and organs where the polynucleotide and/or polypeptide is expressed (for example, as indicated in Column 8 of Table 1B) or as indicated in the “Preferred Indications” column of Table 1D; comprising administering to a patient diagnostic or therapeutic molecules in combination with proteins, nucleic acids, or antibodies of the invention (or fragments or variants thereof) as represented by Table 1A.

[0119] The tissue distribution and homology to a putative transporter/channel indicates that polynucleotides and polypeptides corresponding to this gene are useful for diagnosis and treatment of liver and pancreatic cancer.

[0120] Features of Protein Encoded by Gene No: 22

[0121] This gene is expressed primarily in brain (e.g., NCI_CGAP_Brn25 (brain), Soares infant brain 1NIB, normalized infant brain cDNA, Soares adult brain N2b5HB55Y, Cerebellum, H. hypothalamus), reproductive tissues (e.g., Human Adult Testes, Human Uterine Cancer).

[0122] Polynucleotides and polypeptides of the invention are useful as reagents for differential identification of the tissue(s) or cell type(s) present in a biological sample and for diagnosis of diseases and conditions which include but are not limited to neurological disorders (e.g., brain tumors) and reproductive conditions and disorders (e.g., infertility, inhibition or promotion of contraception, testicular and uterine cancers). Similarly, polypeptides and antibodies directed to these polypeptides are useful in providing immunological probes for differential identification of the tissue(s) or cell type(s). For a number of disorders of the above tissues or cells, particularly of the central nervous system or reproductive system, expression of this gene at significantly higher or lower levels may be routinely detected in certain tissues or cell types (e.g., cancerous and wounded tissues) or bodily fluids (e.g., serum, plasma, urine, synovial fluid and spinal fluid) or another tissue or sample taken from an individual having such a disorder, relative to the standard gene expression level, i.e., the expression level in healthy tissue or bodily fluid from an individual not having the disorder.

[0123] Embodiments of the invention encompass using polynucleotides and polypeptides (including fragments and variants thereof, and also antibodies, agonists and antagonists thereof) to prevent, diagnose, treat, or ameliorate a disease or disorder. In preferred embodiments, the present invention encompasses a method of preventing, diagnosing, treating, or ameliorating a disease or disorder related to one, two, three, or more, of the cells, tissues, and organs where the polynucleotide and/or polypeptide is expressed (for example, as indicated in Column 8 of Table 1B) or as indicated in the “Preferred Indications” column of Table 1D; comprising administering to a patient in which such prevention, diagnosis, treatment, or amelioration is desired a protein, nucleic acid, or antibody of the invention (or fragment or variant thereof) represented by Table 1A (in the same row as the disease or disorder to be treated is listed in the “Preferred Indications” column of Table 1D) in an amount effective to prevent, diagnose, treat, or ameliorate the disease or disorder. In another embodiment, the present invention also encompasses methods of preventing, diagnosing, treating, or ameliorating a disease or disorder related to one, two, three, or more, of the cells, tissues, and organs where the polynucleotide and/or polypeptide is expressed (for example, as indicated in Column 8 of Table 1B) or as indicated in the “Preferred Indications” column of Table 1D; comprising administering to a patient diagnostic or therapeutic molecules in combination with proteins, nucleic acids, or antibodies of the invention (or fragments or variants thereof) as represented by Table 1A.

[0124] The tissue distribution indicates that polynucleotides and polypeptides corresponding to this gene are useful for diagnosis and treatment of cancer and other proliferative disorders, particularly of the brain, testis, and uterus.

[0125] Features of Protein Encoded by Gene No: 23

[0126] The translation product of this gene shares sequence homology with airway trypsin-like protease which is thought to be important in the host defense system on the mucous membrane independently of or in cooperation with other substances in airway mucous or bronchial secretions.

[0127] This gene is expressed primarily in pancreas and esophagus (e.g., Cancer Pancreas #14677A1L; Normal esophagus; Normal Pancreas 42206; Pancreatic cancer #14677A1L; esophageal cancer #0011C075Ra; Malignant Esophagus #9706C049).

[0128] Polynucleotides and polypeptides of the invention are useful as reagents for differential identification of the tissue(s) or cell type(s) present in a biological sample and for diagnosis of diseases and conditions which include but are not limited to disorders such as pancreatitis, pancreatic cancer, diabetes, and esophageal cancer. Similarly, polypeptides and antibodies directed to these polypeptides are useful in providing immunological probes for differential identification of the tissue(s) or cell type(s). For a number of disorders of the above tissues or cells, particularly of the gastrointestinal system (i.e., particularly involving the pancreas) and esophagus, expression of this gene at significantly higher or lower levels may be routinely detected in certain tissues or cell types (e.g., cancerous and wounded tissues) or bodily fluids (e.g., serum, plasma, urine, synovial fluid and spinal fluid) or another tissue or sample taken from an individual having such a disorder, relative to the standard gene expression level, i.e., the expression level in healthy tissue or bodily fluid from an individual not having the disorder.

[0129] Embodiments of the invention encompass using polynucleotides and polypeptides (including fragments and variants thereof, and also antibodies, agonists and antagonists thereof) to prevent, diagnose, treat, or ameliorate a disease or disorder. In preferred embodiments, the present invention encompasses a method of preventing, diagnosing, treating, or ameliorating a disease or disorder related to one, two, three, or more, of the cells, tissues, and organs where the polynucleotide and/or polypeptide is expressed (for example, as indicated in Column 8 of Table 1B) or as indicated in the “Preferred Indications” column of Table 1D; comprising administering to a patient in which such prevention, diagnosis, treatment, or amelioration is desired a protein, nucleic acid, or antibody of the invention (or fragment or variant thereof) represented by Table 1A (in the same row as the disease or disorder to be treated is listed in the “Preferred Indications” column of Table 1D) in an amount effective to prevent, diagnose, treat, or ameliorate the disease or disorder. In another embodiment, the present invention also encompasses methods of preventing, diagnosing, treating, or ameliorating a disease or disorder related to one, two, three, or more, of the cells, tissues, and organs where the polynucleotide and/or polypeptide is expressed (for example, as indicated in Column 8 of Table 1B) or as indicated in the “Preferred Indications” column of Table 1D; comprising administering to a patient diagnostic or therapeutic molecules in combination with proteins, nucleic acids, or antibodies of the invention (or fragments or variants thereof) as represented by Table 1A.

[0130] The tissue distribution and homology to a secreted trypsin-like protease indicates that polynucleotides and polypeptides corresponding to this gene are useful for treatment of diseases of the esophagus and the pancreas (particularly cancer).

[0131] Features of Protein Encoded by Gene No: 24

[0132] The translation product of this gene shares sequence homology with pulmonary surfactant protein A which is thought to be important in maintaining lung function.

[0133] This gene is expressed primarily in lung, both normal and lung cancer and to a lesser extent in testes.

[0134] Polynucleotides and polypeptides of the invention are useful as reagents for differential identification of the tissue(s) or cell type(s) present in a biological sample and for diagnosis of diseases and conditions which include but are not limited to: lung cancer, emphysema, asthma and COPD. Similarly, polypeptides and antibodies directed to these polypeptides are useful in providing immunological probes for differential identification of the tissue(s) or cell type(s). For a number of disorders of the above tissues or cells, particularly of the respiratory system, expression of this gene at significantly higher or lower levels may be routinely detected in certain tissues or cell types (e.g., cancerous and wounded tissues) or bodily fluids (e.g., serum, plasma, urine, synovial fluid and spinal fluid) or another tissue or sample taken from an individual having such a disorder, relative to the standard gene expression level, i.e., the expression level in healthy tissue or bodily fluid from an individual not having the disorder.

[0135] Embodiments of the invention encompass using polynucleotides and polypeptides (including fragments and variants thereof, and also antibodies, agonists and antagonists thereof) to prevent, diagnose, treat, or ameliorate a disease or disorder. In preferred embodiments, the present invention encompasses a method of preventing, diagnosing, treating, or ameliorating a disease or disorder related to one, two, three, or more, of the cells, tissues, and organs where the polynucleotide and/or polypeptide is expressed (for example, as indicated in Column 8 of Table 1B) or as indicated in the “Preferred Indications” column of Table 1D; comprising administering to a patient in which such prevention, diagnosis, treatment, or amelioration is desired a protein, nucleic acid, or antibody of the invention (or fragment or variant thereof) represented by Table 1A (in the same row as the disease or disorder to be treated is listed in the “Preferred Indications” column of Table 1D) in an amount effective to prevent, diagnose, treat, or ameliorate the disease or disorder. In another embodiment, the present invention also encompasses methods of preventing, diagnosing, treating, or ameliorating a disease or disorder related to one, two, three, or more, of the cells, tissues, and organs where the polynucleotide and/or polypeptide is expressed (for example, as indicated in Column 8 of Table 1B) or as indicated in the “Preferred Indications” column of Table 1D; comprising administering to a patient diagnostic or therapeutic molecules in combination with proteins, nucleic acids, or antibodies of the invention (or fragments or variants thereof) as represented by Table 1A.

[0136] The lung specific tissue distribution and homology to lung surfactant protein indicates that polynucleotides and polypeptides corresponding to this gene are useful for the diagnosis and treatment of lung diseases, especially lung cancer, where the protein may be used to detect and treat distant metastatic lung cancer lesions, or alternately the protein could be used for the development of a blood test in order to monitor for the growth of lung carcinoma. Alternately, the nucleotides and its encoded polypeptides may be useful for the other pulmonary diseases including asthma—where it may be useful to prevent tissue damage due to the influx of eosinophils and neutrophils, Chronic Obstructive Pulmonary Disease (COPD), Emphysema, Cystic fibrosis, and lung infections

[0137] Features of Protein Encoded by Gene No: 25

[0138] The translation product of this gene shares sequence homology with calcium binding proteins (a characteristic motif of proteins with critical roles in signal transduction pathways).

[0139] This gene is expressed primarily in Prostate (NCI_CGAP_Pr28); total fetus; pregnant uterus; pooled melanocytes, fetal heart, and pregnant uterus and to a lesser extent in Human cell line from hepatocellular carcinoma; and liver.

[0140] Polynucleotides and polypeptides of the invention are useful as reagents for differential identification of the tissue(s) or cell type(s) present in a biological sample and for diagnosis of diseases and conditions which include but are not limited to: liver disease, especially hepatocellular tumors. Similarly, polypeptides and antibodies directed to these polypeptides are useful in providing immunological probes for differential identification of the tissue(s) or cell type(s). For a number of disorders of the above tissues or cells, particularly of the liver, expression of this gene at significantly higher or lower levels may be routinely detected in certain tissues or cell types (e.g., cancerous and wounded tissues) or bodily fluids (e.g., serum, plasma, urine, synovial fluid and spinal fluid) or another tissue or sample taken from an individual having such a disorder, relative to the standard gene expression level, i.e., the expression level in healthy tissue or bodily fluid from an individual not having the disorder.

[0141] Embodiments of the invention encompass using polynucleotides and polypeptides (including fragments and variants thereof, and also antibodies, agonists and antagonists thereof) to prevent, diagnose, treat, or ameliorate a disease or disorder. In preferred embodiments, the present invention encompasses a method of preventing, diagnosing, treating, or ameliorating a disease or disorder related to one, two, three, or more, of the cells, tissues, and organs where the polynucleotide and/or polypeptide is expressed (for example, as indicated in Column 8 of Table 1B) or as indicated in the “Preferred Indications” column of Table 1D; comprising administering to a patient in which such prevention, diagnosis, treatment, or amelioration is desired a protein, nucleic acid, or antibody of the invention (or fragment or variant thereof) represented by Table 1A (in the same row as the disease or disorder to be treated is listed in the “Preferred Indications” column of Table 1D) in an amount effective to prevent, diagnose, treat, or ameliorate the disease or disorder. In another embodiment, the present invention also encompasses methods of preventing, diagnosing, treating, or ameliorating a disease or disorder related to one, two, three, or more, of the cells, tissues, and organs where the polynucleotide and/or polypeptide is expressed (for example, as indicated in Column 8 of Table 1B) or as indicated in the “Preferred Indications” column of Table 1D; comprising administering to a patient diagnostic or therapeutic molecules in combination with proteins, nucleic acids, or antibodies of the invention (or fragments or variants thereof) as represented by Table 1A.

[0142] The tissue distribution (including expression in hepatocellular tumor) and homology to calcium binding proteins indicates that polynucleotides and polypeptides corresponding to this gene are useful for diagnosis and treatment of cancer and other proliferative disorders, particularly hepatocellular tumors.

[0143] Features of Protein Encoded by Gene No: 26

[0144] This gene is expressed primarily in glioblastoma.

[0145] Polynucleotides and polypeptides of the invention are useful as reagents for differential identification of the tissue(s) or cell type(s) present in a biological sample and for diagnosis of diseases and conditions which include but are not limited to brain cancer (e.g. glioblastoma). Similarly, polypeptides and antibodies directed to these polypeptides are useful in providing immunological probes for differential identification of the tissue(s) or cell type(s). For a number of disorders of the above tissues or cells, particularly of the central nervous system, expression of this gene at significantly higher or lower levels may be routinely detected in certain tissues or cell types (e.g., cancerous and wounded tissues) or bodily fluids (e.g., serum, plasma, urine, synovial fluid and spinal fluid) or another tissue or sample taken from an individual having such a disorder, relative to the standard gene expression level, i.e., the expression level in healthy tissue or bodily fluid from an individual not having the disorder.

[0146] Embodiments of the invention encompass using polynucleotides and polypeptides (including fragments and variants thereof, and also antibodies, agonists and antagonists thereof) to prevent, diagnose, treat, or ameliorate a disease or disorder. In preferred embodiments, the present invention encompasses a method of preventing, diagnosing, treating, or ameliorating a disease or disorder related to one, two, three, or more, of the cells, tissues, and organs where the polynucleotide and/or polypeptide is expressed (for example, as indicated in Column 8 of Table 1B) or as indicated in the “Preferred Indications” column of Table 1D; comprising administering to a patient in which such prevention, diagnosis, treatment, or amelioration is desired a protein, nucleic acid, or antibody of the invention (or fragment or variant thereof) represented by Table 1A (in the same row as the disease or disorder to be treated is listed in the “Preferred Indications” column of Table 1D) in an amount effective to prevent, diagnose, treat, or ameliorate the disease or disorder. In another embodiment, the present invention also encompasses methods of preventing, diagnosing, treating, or ameliorating a disease or disorder related to one, two, three, or more, of the cells, tissues, and organs where the polynucleotide and/or polypeptide is expressed (for example, as indicated in Column 8 of Table 1B) or as indicated in the “Preferred Indications” column of Table 1D; comprising administering to a patient diagnostic or therapeutic molecules in combination with proteins, nucleic acids, or antibodies of the invention (or fragments or variants thereof) as represented by Table 1A.

[0147] The tissue distribution indicates that polynucleotides and polypeptides corresponding to this gene are useful for diagnosis and treatment of brain cancer and other proliferative disorders, particularly of glioblastoma.

[0148] Features of Protein Encoded by Gene No: 27

[0149] This gene is expressed primarily in pancreatic cancer and to a lesser extent in uterine and colon tumors.

[0150] Polynucleotides and polypeptides of the invention are useful as reagents for differential identification of the tissue(s) or cell type(s) present in a biological sample and for diagnosis of diseases and conditions which include but are not limited to pancreatic, uterine, and colon cancer. Similarly, polypeptides and antibodies directed to these polypeptides are useful in providing immunological probes for differential identification of the tissue(s) or cell type(s). For a number of disorders of the above tissues or cells, particularly of the endocrine, digestive and reproductive systems, expression of this gene at significantly higher or lower levels may be routinely detected in certain tissues or cell types (e.g., cancerous and wounded tissues) or bodily fluids (e.g., serum, plasma, urine, synovial fluid and spinal fluid) or another tissue or sample taken from an individual having such a disorder, relative to the standard gene expression level, i.e., the expression level in healthy tissue or bodily fluid from an individual not having the disorder.

[0151] Embodiments of the invention encompass using polynucleotides and polypeptides (including fragments and variants thereof, and also antibodies, agonists and antagonists thereof) to prevent, diagnose, treat, or ameliorate a disease or disorder. In preferred embodiments, the present invention encompasses a method of preventing, diagnosing, treating, or ameliorating a disease or disorder related to one, two, three, or more, of the cells, tissues, and organs where the polynucleotide and/or polypeptide is expressed (for example, as indicated in Column 8 of Table 1B) or as indicated in the “Preferred Indications” column of Table 1D; comprising administering to a patient in which such prevention, diagnosis, treatment, or amelioration is desired a protein, nucleic acid, or antibody of the invention (or fragment or variant thereof) represented by Table 1A (in the same row as the disease or disorder to be treated is listed in the “Preferred Indications” column of Table 1D) in an amount effective to prevent, diagnose, treat, or ameliorate the disease or disorder. In another embodiment, the present invention also encompasses methods of preventing, diagnosing, treating, or ameliorating a disease or disorder related to one, two, three, or more, of the cells, tissues, and organs where the polynucleotide and/or polypeptide is expressed (for example, as indicated in Column 8 of Table 1B) or as indicated in the “Preferred Indications” column of Table 1D; comprising administering to a patient diagnostic or therapeutic molecules in combination with proteins, nucleic acids, or antibodies of the invention (or fragments or variants thereof) as represented by Table 1A.

[0152] The tissue distribution indicates that polynucleotides and polypeptides corresponding to this gene are useful for treatment or diagnosis of pancreatic, colon, and uterine cancer. Elevated expression in uterine and colon tumors also indicate a common role in mediating tumor progression in a variety of adenocarcinomas.

[0153] Features of Protein Encoded by Gene No: 28

[0154] The translation product of this gene shares sequence homology with UDP-N-acetyl-alpha-D-galactosamine:polypeptide N-acetylgalactosaminyltransferase 7 which is thought to be important in modification of protein glycosylation. This gene encodes GalNAc, a member of the GalNAc-transferase family. The enzyme encoded by this gene controls the initiation step of mucin-type O-linked protein glycosylation and transfer of N-acetylgalactosamine to serine and threonine amino acid residues. This enzyme is a type II transmembrane protein and shares common sequence motifs with other family members. Unlike other family members, this enzyme shows exclusive specificity for partially GalNAc-glycosylated acceptor substrates and shows no activity with non-glycosylated peptides. This protein may function as a follow-up enzyme in the initiation step of O-glycosylation.

[0155] This gene is expressed primarily in esophageal cancer, and ductal carcinoma.

[0156] Polynucleotides and polypeptides of the invention are useful as reagents for differential identification of the tissue(s) or cell type(s) present in a biological sample and for diagnosis of diseases and conditions which include but are not limited to esophageal cancer. Similarly, polypeptides and antibodies directed to these polypeptides are useful in providing immunological probes for differential identification of the tissue(s) or cell type(s). For a number of disorders of the above tissues or cells, particularly of the esophagus, expression of this gene at significantly higher or lower levels may be routinely detected in certain tissues or cell types (e.g., cancerous and wounded tissues) or bodily fluids (e.g., serum, plasma, urine, synovial fluid and spinal fluid) or another tissue or sample taken from an individual having such a disorder, relative to the standard gene expression level, i.e., the expression level in healthy tissue or bodily fluid from an individual not having the disorder.

[0157] Embodiments of the invention encompass using polynucleotides and polypeptides (including fragments and variants thereof, and also antibodies, agonists and antagonists thereof) to prevent, diagnose, treat, or ameliorate a disease or disorder. In preferred embodiments, the present invention encompasses a method of preventing, diagnosing, treating, or ameliorating a disease or disorder related to one, two, three, or more, of the cells, tissues, and organs where the polynucleotide and/or polypeptide is expressed (for example, as indicated in Column 8 of Table 1B) or as indicated in the “Preferred Indications” column of Table 1D; comprising administering to a patient in which such prevention, diagnosis, treatment, or amelioration is desired a protein, nucleic acid, or antibody of the invention (or fragment or variant thereof) represented by Table 1A (in the same row as the disease or disorder to be treated is listed in the “Preferred Indications” column of Table 1D) in an amount effective to prevent, diagnose, treat, or ameliorate the disease or disorder. In another embodiment, the present invention also encompasses methods of preventing, diagnosing, treating, or ameliorating a disease or disorder related to one, two, three, or more, of the cells, tissues, and organs where the polynucleotide and/or polypeptide is expressed (for example, as indicated in Column 8 of Table 1B) or as indicated in the “Preferred Indications” column of Table 1D; comprising administering to a patient diagnostic or therapeutic molecules in combination with proteins, nucleic acids, or antibodies of the invention (or fragments or variants thereof) as represented by Table 1A.

[0158] The tissue distribution and homology to GalNAc-transferase family indicates that polynucleotides and polypeptides corresponding to this gene are useful for treatment of esophageal cancer.

[0159] Features of Protein Encoded by Gene No: 29

[0160] The translation product of this gene shares sequence homology with PAI2 human plasminogen activator inhibitor-2 which is thought to be important in the control of blood clotting.

[0161] This gene is expressed primarily in the digestive system and to a lesser extent in liver and hepatocellular carcinoma. NCI_CGAP_Co11; Diabetic Liver #1042; Soares placenta Nb2HP; GKC; Human fetal brain (T. Fujiwara); Hepatocellular Tumor; NCI_CGAP_Co14; Clontech human aorta polyA+ mRNA (#6572); Stratagene liver (#937224); NCI_CGAP_Pan1; NCI_CGAP_Kid11; Colon Normal II; Stomach Tumor; Soares fetal liver spleen 1NFLS; Human adult small intestine, re-excision; Human Colon Cancer; re-excision; Hepatocellular Tumor; re-excision; Human Stomach; re-excision; Human Osteoclastoma, re-excision; Morton Fetal Cochlea; Diabetic Liver 99-09-A281a; Stratagene pancreas (#937208); Liver, Hepatoma; Esophagus, Disseminated adenocarcinoma; Hepatocellular Tumor; re-excision; Human Placenta (re-excision); Human Liver, normal; 12 Week Old Early Stage Human; Colon Tumor; Human Pancreas Tumor; Re excision; Liver Tumor Met 5 Tumor; Rectum tumor; Colon Tumor; Stomach Normal; Colon Normal; Human Endometrial Tumor; and NCI_CGAP_GU1.

[0162] Polynucleotides and polypeptides of the invention are useful as reagents for differential identification of the tissue(s) or cell type(s) present in a biological sample and for diagnosis of diseases and conditions which include but are not limited to: cancer and gastrointestinal disorders. Similarly, polypeptides and antibodies directed to these polypeptides are useful in providing immunological probes for differential identification of the tissue(s) or cell type(s). For a number of disorders of the above tissues or cells, particularly of the digestive system, expression of this gene at significantly higher or lower levels may be routinely detected in certain tissues or cell types (e.g., cancerous and wounded tissues) or bodily fluids (e.g., serum, plasma, urine, synovial fluid and spinal fluid) or another tissue or sample taken from an individual having such a disorder, relative to the standard gene expression level, i.e., the expression level in healthy tissue or bodily fluid from an individual not having the disorder.

[0163] Embodiments of the invention encompass using polynucleotides and polypeptides (including fragments and variants thereof, and also antibodies, agonists and antagonists thereof) to prevent, diagnose, treat, or ameliorate a disease or disorder. In preferred embodiments, the present invention encompasses a method of preventing, diagnosing, treating, or ameliorating a disease or disorder related to one, two, three, or more, of the cells, tissues, and organs where the polynucleotide and/or polypeptide is expressed (for example, as indicated in Column 8 of Table 1B) or as indicated in the “Preferred Indications” column of Table 1D; comprising administering to a patient in which such prevention, diagnosis, treatment, or amelioration is desired a protein, nucleic acid, or antibody of the invention (or fragment or variant thereof) represented by Table 1A (in the same row as the disease or disorder to be treated is listed in the “Preferred Indications” column of Table 1D) in an amount effective to prevent, diagnose, treat, or ameliorate the disease or disorder. In another embodiment, the present invention also encompasses methods of preventing, diagnosing, treating, or ameliorating a disease or disorder related to one, two, three, or more, of the cells, tissues, and organs where the polynucleotide and/or polypeptide is expressed (for example, as indicated in Column 8 of Table 1B) or as indicated in the “Preferred Indications” column of Table 1D; comprising administering to a patient diagnostic or therapeutic molecules in combination with proteins, nucleic acids, or antibodies of the invention (or fragments or variants thereof) as represented by Table 1A.

[0164] The tissue distribution and homology to plasminogen activator inhibitor-2 indicates that polynucleotides and polypeptides corresponding to this gene are useful for treatment of clotting disorders and diseases involving the immune system.

[0165] Features of Protein Encoded by Gene No: 30

[0166] This gene is widely expressed in most cell and tissue types including breast, placenta and in lung.

[0167] Polynucleotides and polypeptides of the invention are useful as reagents for differential identification of the tissue(s) or cell type(s) present in a biological sample and for diagnosis of diseases and conditions which include but are not limited to: reproductive disorders and pulmonary disorders including lung cancer. Similarly, polypeptides and antibodies directed to these polypeptides are useful in providing immunological probes for differential identification of the tissue(s) or cell type(s). For a number of disorders of the above tissues or cells, particularly of the reproductive and pulmonary systems, expression of this gene at significantly higher or lower levels may be routinely detected in certain tissues or cell types (e.g., cancerous and wounded tissues) or bodily fluids (e.g., serum, plasma, urine, synovial fluid and spinal fluid) or another tissue or sample taken from an individual having such a disorder, relative to the standard gene expression level, i.e., the expression level in healthy tissue or bodily fluid from an individual not having the disorder. Embodiments of the invention encompass using polynucleotides and polypeptides (including fragments and variants thereof, and also antibodies, agonists and antagonists thereof) to prevent, diagnose, treat, or ameliorate a disease or disorder. In preferred embodiments, the present invention encompasses a method of preventing, diagnosing, treating, or ameliorating a disease or disorder related to one, two, three, or more, of the cells, tissues, and organs where the polynucleotide and/or polypeptide is expressed (for example, as indicated in Column 8 of Table 1B) or as indicated in the “Preferred Indications” column of Table 1D; comprising administering to a patient in which such prevention, diagnosis, treatment, or amelioration is desired a protein, nucleic acid, or antibody of the invention (or fragment or variant thereof) represented by Table 1A (in the same row as the disease or disorder to be treated is listed in the “Preferred Indications” column of Table 1D) in an amount effective to prevent, diagnose, treat, or ameliorate the disease or disorder. In another embodiment, the present invention also encompasses methods of preventing, diagnosing, treating, or ameliorating a disease or disorder related to one, two, three, or more, of the cells, tissues, and organs where the polynucleotide and/or polypeptide is expressed (for example, as indicated in Column 8 of Table 1B) or as indicated in the “Preferred Indications” column of Table 1D; comprising administering to a patient diagnostic or therapeutic molecules in combination with proteins, nucleic acids, or antibodies of the invention (or fragments or variants thereof) as represented by Table 1A.

[0168] The tissue distribution indicates that polynucleotides and polypeptides corresponding to this gene are useful for the treatment and detection of breast cancer, disorders and complications associated with pregnancy and with pulmonary disorders including lung cancer.

[0169] Features of Protein Encoded by Gene No: 31

[0170] This gene is expressed primarily in lung cancer.

[0171] Polynucleotides and polypeptides of the invention are useful as reagents for differential identification of the tissue(s) or cell type(s) present in a biological sample and for diagnosis of diseases and conditions which include but are not limited to: lung cancer, and pulmonary disorders. Similarly, polypeptides and antibodies directed to these polypeptides are useful in providing immunological probes for differential identification of the tissue(s) or cell type(s). For a number of disorders of the above tissues or cells, particularly of the pulmonary system, expression of this gene at significantly higher or lower levels may be routinely detected in certain tissues or cell types (e.g., cancerous and wounded tissues) or bodily fluids (e.g., serum, plasma, urine, synovial fluid and spinal fluid) or another tissue or sample taken from an individual having such a disorder, relative to the standard gene expression level, i.e., the expression level in healthy tissue or bodily fluid from an individual not having the disorder.

[0172] Embodiments of the invention encompass using polynucleotides and polypeptides (including fragments and variants thereof, and also antibodies, agonists and antagonists thereof) to prevent, diagnose, treat, or ameliorate a disease or disorder. In preferred embodiments, the present invention encompasses a method of preventing, diagnosing, treating, or ameliorating a disease or disorder related to one, two, three, or more, of the cells, tissues, and organs where the polynucleotide and/or polypeptide is expressed (for example, as indicated in Column 8 of Table 1B) or as indicated in the “Preferred Indications” column of Table 1D; comprising administering to a patient in which such prevention, diagnosis, treatment, or amelioration is desired a protein, nucleic acid, or antibody of the invention (or fragment or variant thereof) represented by Table 1A (in the same row as the disease or disorder to be treated is listed in the “Preferred Indications” column of Table 1D) in an amount effective to prevent, diagnose, treat, or ameliorate the disease or disorder. In another embodiment, the present invention also encompasses methods of preventing, diagnosing, treating, or ameliorating a disease or disorder related to one, two, three, or more, of the cells, tissues, and organs where the polynucleotide and/or polypeptide is expressed (for example, as indicated in Column 8 of Table 1B) or as indicated in the “Preferred Indications” column of Table 1D; comprising administering to a patient diagnostic or therapeutic molecules in combination with proteins, nucleic acids, or antibodies of the invention (or fragments or variants thereof) as represented by Table 1A.

[0173] The tissue distribution indicates that polynucleotides and polypeptides corresponding to this gene are useful for the treatment and/or detection of lung cancer, and in addition other lung disorders including cystic fibrosis, chronic obstructive pulmonary disease, asthma, pulmonary fibrosis, edema, embolism, and acute lung injury.

[0174] Features of Protein Encoded by Gene No: 32

[0175] This gene is expressed primarily in lung cancer.

[0176] Polynucleotides and polypeptides of the invention are useful as reagents for differential identification of the tissue(s) or cell type(s) present in a biological sample and for diagnosis of diseases and conditions which include but are not limited to lung cancer. Similarly, polypeptides and antibodies directed to these polypeptides are useful in providing immunological probes for differential identification of the tissue(s) or cell type(s). For a number of disorders of the above tissues or cells, particularly of the pulmonary system, expression of this gene at significantly higher or lower levels may be routinely detected in certain tissues or cell types (e.g., cancerous and wounded tissues) or bodily fluids (e.g., serum, plasma, urine, synovial fluid and spinal fluid) or another tissue or sample taken from an individual having such a disorder, relative to the standard gene expression level, i.e., the expression level in healthy tissue or bodily fluid from an individual not having the disorder. Embodiments of the invention encompass using polynucleotides and polypeptides (including fragments and variants thereof, and also antibodies, agonists and antagonists thereof) to prevent, diagnose, treat, or ameliorate a disease or disorder. In preferred embodiments, the present invention encompasses a method of preventing, diagnosing, treating, or ameliorating a disease or disorder related to one, two, three, or more, of the cells, tissues, and organs where the polynucleotide and/or polypeptide is expressed (for example, as indicated in Column 8 of Table 1B) or as indicated in the “Preferred Indications” column of Table 1D; comprising administering to a patient in which such prevention, diagnosis, treatment, or amelioration is desired a protein, nucleic acid, or antibody of the invention (or fragment or variant thereof) represented by Table 1A (in the same row as the disease or disorder to be treated is listed in the “Preferred Indications” column of Table 1D) in an amount effective to prevent, diagnose, treat, or ameliorate the disease or disorder. In another embodiment, the present invention also encompasses methods of preventing, diagnosing, treating, or ameliorating a disease or disorder related to one, two, three, or more, of the cells, tissues, and organs where the polynucleotide and/or polypeptide is expressed (for example, as indicated in Column 8 of Table 1B) or as indicated in the “Preferred Indications” column of Table 1D; comprising administering to a patient diagnostic or therapeutic molecules in combination with proteins, nucleic acids, or antibodies of the invention (or fragments or variants thereof) as represented by Table 1A.

[0177] The tissue distribution indicates that polynucleotides and polypeptides corresponding to this gene are useful for the treatment and/or detection of lung cancer, and in addition other lung disorders including cystic fibrosis, chronic obstructive pulmonary disease, asthma, pulmonary fibrosis, edema, embolism, and acute lung injury.

[0178] Features of Protein Encoded by Gene No: 33

[0179] The translation product of this gene shares sequence homology with N-methyl-D-aspartate receptor glutamate-binding chain which is thought to be important in regulation of neurotransmitter responses.

[0180] This gene is expressed primarily in hematopoietic tissues especially dendritic cells and to a lesser extent in colon tumor, sex hormone responsive tissues including ovary, uterus, breast prostate and testes and neural tissues including cerebellum and pineal gland.

[0181] Polynucleotides and polypeptides of the invention are useful as reagents for differential identification of the tissue(s) or cell type(s) present in a biological sample and for diagnosis of diseases and conditions which include but are not limited to: lung cancer. Similarly, polypeptides and antibodies directed to these polypeptides are useful in providing immunological probes for differential identification of the tissue(s) or cell type(s). For a number of disorders of the above tissues or cells, particularly of the respiratory system, expression of this gene at significantly higher or lower levels may be routinely detected in certain tissues or cell types (e.g., cancerous and wounded tissues) or bodily fluids (e.g., serum, plasma, urine, synovial fluid and spinal fluid) or another tissue or sample taken from an individual having such a disorder, relative to the standard gene expression level, i.e., the expression level in healthy tissue or bodily fluid from an individual not having the disorder.

[0182] Embodiments of the invention encompass using polynucleotides and polypeptides (including fragments and variants thereof, and also antibodies, agonists and antagonists thereof) to prevent, diagnose, treat, or ameliorate a disease or disorder. In preferred embodiments, the present invention encompasses a method of preventing, diagnosing, treating, or ameliorating a disease or disorder related to one, two, three, or more, of the cells, tissues, and organs where the polynucleotide and/or polypeptide is expressed (for example, as indicated in Column 8 of Table 1B) or as indicated in the “Preferred Indications” column of Table 1D; comprising administering to a patient in which such prevention, diagnosis, treatment, or amelioration is desired a protein, nucleic acid, or antibody of the invention (or fragment or variant thereof) represented by Table 1A (in the same row as the disease or disorder to be treated is listed in the “Preferred Indications” column of Table 1D) in an amount effective to prevent, diagnose, treat, or ameliorate the disease or disorder. In another embodiment, the present invention also encompasses methods of preventing, diagnosing, treating, or ameliorating a disease or disorder related to one, two, three, or more, of the cells, tissues, and organs where the polynucleotide and/or polypeptide is expressed (for example, as indicated in Column 8 of Table 1B) or as indicated in the “Preferred Indications” column of Table 1D; comprising administering to a patient diagnostic or therapeutic molecules in combination with proteins, nucleic acids, or antibodies of the invention (or fragments or variants thereof) as represented by Table 1A.

[0183] The homology to NMDA receptor indicates that polynucleotides and polypeptides corresponding to this gene are useful for detection, treatment and targeting of lung cancer, especially neuroendocrine tumors of the lung and bronchial carcinoid and other malignancies of the neural system. Based on expression profiling, the protein may also be useful for the treatment of reproductive disorders such as infertility, endometriosis, breast cancer, testicular and prostate cancer. The gene is also of use for the treatment of colon cancer. Based on expression in dendritic cells the gene is also useful for immune modulation including antigen presentation/immune stimulation, allergy, asthma, autoimmune disease including RA and SLE

[0184] Features of Protein Encoded by Gene No: 34

[0185] This gene is expressed primarily in connective/epithelial, and digestive tissues and to a lesser extent in musculoskeletal, respiratory, immune/hematopoietic tissues.

[0186] Polynucleotides and polypeptides of the invention are useful as reagents for differential identification of the tissue(s) or cell type(s) present in a biological sample and for diagnosis of diseases and conditions which include but are not limited to: disorders in connective/epithelial, and digestive systems. Similarly, polypeptides and antibodies directed to these polypeptides are useful in providing immunological probes for differential identification of the tissue(s) or cell type(s). For a number of disorders of the above tissues or cells, particularly of the connective/epithelial, and digestive, expression of this gene at significantly higher or lower levels may be routinely detected in certain tissues or cell types (e.g., cancerous and wounded tissues) or bodily fluids (e.g., serum, plasma, urine, synovial fluid and spinal fluid) or another tissue or sample taken from an individual having such a disorder, relative to the standard gene expression level, i.e., the expression level in healthy tissue or bodily fluid from an individual not having the disorder.

[0187] Embodiments of the invention encompass using polynucleotides and polypeptides (including fragments and variants thereof, and also antibodies, agonists and antagonists thereof) to prevent, diagnose, treat, or ameliorate a disease or disorder. In preferred embodiments, the present invention encompasses a method of preventing, diagnosing, treating, or ameliorating a disease or disorder related to one, two, three, or more, of the cells, tissues, and organs where the polynucleotide and/or polypeptide is expressed (for example, as indicated in Column 8 of Table 1B) or as indicated in the “Preferred Indications” column of Table 1D; comprising administering to a patient in which such prevention, diagnosis, treatment, or amelioration is desired a protein, nucleic acid, or antibody of the invention (or fragment or variant thereof) represented by Table 1A (in the same row as the disease or disorder to be treated is listed in the “Preferred Indications” column of Table 1D) in an amount effective to prevent, diagnose, treat, or ameliorate the disease or disorder. In another embodiment, the present invention also encompasses methods of preventing, diagnosing, treating, or ameliorating a disease or disorder related to one, two, three, or more, of the cells, tissues, and organs where the polynucleotide and/or polypeptide is expressed (for example, as indicated in Column 8 of Table 1B) or as indicated in the “Preferred Indications” column of Table 1D; comprising administering to a patient diagnostic or therapeutic molecules in combination with proteins, nucleic acids, or antibodies of the invention (or fragments or variants thereof) as represented by Table 1A.

[0188] The tissue distribution indicates that polynucleotides and polypeptides corresponding to this gene are useful for detection, prevention, and treatment of cancers of the connective/epithelial tissues of the digestive tract, musculoskeletal system, respiratory, and immune/hematopoietic tissues.

[0189] Features of Protein Encoded by Gene No: 35

[0190] The translation product of this gene shares sequence homology with ladnin-1 which is thought to be important in epithelial basement membrane integrity.

[0191] This gene is expressed primarily in reproductive tissues including endometrial tumors, ovarian tumors, and epididymis and to a lesser extent in keratinocytes, colon, pancreatic tumor, normal pancreas epithelial cells and kidney.

[0192] Polynucleotides and polypeptides of the invention are useful as reagents for differential identification of the tissue(s) or cell type(s) present in a biological sample and for diagnosis of diseases and conditions which include but are not limited to endometrial tumors, ovarian tumors, and epididymis and to a lesser extent in keratinocytes, colon, pancreatic tumor, normal pancreas epithelial cells and kidney. Similarly, polypeptides and antibodies directed to these polypeptides are useful in providing immunological probes for differential identification of the tissue(s) or cell type(s). For a number of disorders of the above tissues or cells, particularly of the reproductive, integumentary (e.g., skin), and digestive systems, expression of this gene at significantly higher or lower levels may be routinely detected in certain tissues or cell types (e.g., cancerous and wounded tissues) or bodily fluids (e.g., serum, plasma, urine, synovial fluid and spinal fluid) or another tissue or sample taken from an individual having such a disorder, relative to the standard gene expression level, i.e., the expression level in healthy tissue or bodily fluid from an individual not having the disorder.

[0193] Embodiments of the invention encompass using polynucleotides and polypeptides (including fragments and variants thereof, and also antibodies, agonists and antagonists thereof) to prevent, diagnose, treat, or ameliorate a disease or disorder. In preferred embodiments, the present invention encompasses a method of preventing, diagnosing, treating, or ameliorating a disease or disorder related to one, two, three, or more, of the cells, tissues, and organs where the polynucleotide and/or polypeptide is expressed (for example, as indicated in Column 8 of Table 1B) or as indicated in the “Preferred Indications” column of Table 1D; comprising administering to a patient in which such prevention, diagnosis, treatment, or amelioration is desired a protein, nucleic acid, or antibody of the invention (or fragment or variant thereof) represented by Table 1A (in the same row as the disease or disorder to be treated is listed in the “Preferred Indications” column of Table 1D) in an amount effective to prevent, diagnose, treat, or ameliorate the disease or disorder. In another embodiment, the present invention also encompasses methods of preventing, diagnosing, treating, or ameliorating a disease or disorder related to one, two, three, or more, of the cells, tissues, and organs where the polynucleotide and/or polypeptide is expressed (for example, as indicated in Column 8 of Table 1B) or as indicated in the “Preferred Indications” column of Table 1D; comprising administering to a patient diagnostic or therapeutic molecules in combination with proteins, nucleic acids, or antibodies of the invention (or fragments or variants thereof) as represented by Table 1A.

[0194] The tissue distribution and homology to ladnin indicates that polynucleotides and polypeptides corresponding to this gene are useful for tumors including endometrial, ovarian and pancreatic. Since the encoded protein may have a role in basement membrane integrity, this protein may be particularly useful in the prevention of metastatic dissemination of the tumor cells out of the primary tumor. The gene may also be useful for wound repair, in maintaining epithelial integrity.

[0195] Features of Protein Encoded by Gene No: 36

[0196] This gene is expressed primarily in lung cancer.

[0197] Polynucleotides and polypeptides of the invention are useful as reagents for differential identification of the tissue(s) or cell type(s) present in a biological sample and for diagnosis of diseases and conditions which include but are not limited to: lung cancer and lung disorders. Similarly, polypeptides and antibodies directed to these polypeptides are useful in providing immunological probes for differential identification of the tissue(s) or cell type(s). For a number of disorders of the above tissues or cells, particularly of the pulmonary system, expression of this gene at significantly higher or lower levels may be routinely detected in certain tissues or cell types (e.g., cancerous and wounded tissues) or bodily fluids (e.g., serum, plasma, urine, synovial fluid and spinal fluid) or another tissue or sample taken from an individual having such a disorder, relative to the standard gene expression level, i.e., the expression level in healthy tissue or bodily fluid from an individual not having the disorder.

[0198] Embodiments of the invention encompass using polynucleotides and polypeptides (including fragments and variants thereof, and also antibodies, agonists and antagonists thereof) to prevent, diagnose, treat, or ameliorate a disease or disorder. In preferred embodiments, the present invention encompasses a method of preventing, diagnosing, treating, or ameliorating a disease or disorder related to one, two, three, or more, of the cells, tissues, and organs where the polynucleotide and/or polypeptide is expressed (for example, as indicated in Column 8 of Table 1B) or as indicated in the “Preferred Indications” column of Table 1D; comprising administering to a patient in which such prevention, diagnosis, treatment, or amelioration is desired a protein, nucleic acid, or antibody of the invention (or fragment or variant thereof) represented by Table 1A (in the same row as the disease or disorder to be treated is listed in the “Preferred Indications” column of Table 1D) in an amount effective to prevent, diagnose, treat, or ameliorate the disease or disorder. In another embodiment, the present invention also encompasses methods of preventing, diagnosing, treating, or ameliorating a disease or disorder related to one, two, three, or more, of the cells, tissues, and organs where the polynucleotide and/or polypeptide is expressed (for example, as indicated in Column 8 of Table 1B) or as indicated in the “Preferred Indications” column of Table 1D; comprising administering to a patient diagnostic or therapeutic molecules in combination with proteins, nucleic acids, or antibodies of the invention (or fragments or variants thereof) as represented by Table 1A.

[0199] The tissue distribution indicates that polynucleotides and polypeptides corresponding to this gene are useful for the treatment and/or detection of lung cancer, and in addition other lung disorders including cystic fibrosis, chronic obstructive pulmonary disease, asthma, pulmonary fibrosis, edema, embolism, and acute lung injury.

[0200] Features of Protein Encoded by Gene No: 37

[0201] This gene is expressed primarily in lung.

[0202] Polynucleotides and polypeptides of the invention are useful as reagents for differential identification of the tissue(s) or cell type(s) present in a biological sample and for diagnosis of diseases and conditions which include but are not limited to: lung cancer and pulmonary disorders. Similarly, polypeptides and antibodies directed to these polypeptides are useful in providing immunological probes for differential identification of the tissue(s) or cell type(s). For a number of disorders of the above tissues or cells, particularly of the pulmonary system, expression of this gene at significantly higher or lower levels may be routinely detected in certain tissues or cell types (e.g., cancerous and wounded tissues) or bodily fluids (e.g., serum, plasma, urine, synovial fluid and spinal fluid) or another tissue or sample taken from an individual having such a disorder, relative to the standard gene expression level, i.e., the expression level in healthy tissue or bodily fluid from an individual not having the disorder.

[0203] Embodiments of the invention encompass using polynucleotides and polypeptides (including fragments and variants thereof, and also antibodies, agonists and antagonists thereof) to prevent, diagnose, treat, or ameliorate a disease or disorder. In preferred embodiments, the present invention encompasses a method of preventing, diagnosing, treating, or ameliorating a disease or disorder related to one, two, three, or more, of the cells, tissues, and organs where the polynucleotide and/or polypeptide is expressed (for example, as indicated in Column 8 of Table 1B) or as indicated in the “Preferred Indications” column of Table 1D; comprising administering to a patient in which such prevention, diagnosis, treatment, or amelioration is desired a protein, nucleic acid, or antibody of the invention (or fragment or variant thereof) represented by Table 1A (in the same row as the disease or disorder to be treated is listed in the “Preferred Indications” column of Table 1D) in an amount effective to prevent, diagnose, treat, or ameliorate the disease or disorder. In another embodiment, the present invention also encompasses methods of preventing, diagnosing, treating, or ameliorating a disease or disorder related to one, two, three, or more, of the cells, tissues, and organs where the polynucleotide and/or polypeptide is expressed (for example, as indicated in Column 8 of Table 1B) or as indicated in the “Preferred Indications” column of Table 1D; comprising administering to a patient diagnostic or therapeutic molecules in combination with proteins, nucleic acids, or antibodies of the invention (or fragments or variants thereof) as represented by Table 1A.

[0204] The tissue distribution indicates that polynucleotides and polypeptides corresponding to this gene are useful for the treatment and/or detection of lung cancer, and in addition other lung disorders including cystic fibrosis, chronic obstructive pulmonary disease, asthma, pulmonary fibrosis, edema, embolism, and acute lung injury.

[0205] Features of Protein Encoded by Gene No: 38

[0206] The translation product of this gene shares sequence homology with monocarboxylate transporter 4.

[0207] This gene is expressed in most tissue and cell types, with enriched expression in placenta, immune cell types, and lung cancer.

[0208] Polynucleotides and polypeptides of the invention are useful as reagents for differential identification of the tissue(s) or cell type(s) present in a biological sample and for diagnosis of diseases and conditions which include but are not limited to: complications associated with pregnancy, cancer, immune disorders. Similarly, polypeptides and antibodies directed to these polypeptides are useful in providing immunological probes for differential identification of the tissue(s) or cell type(s). For a number of disorders of the above tissues or cells, particularly of the immune system, female reproductive system and pulmonary systems, expression of this gene at significantly higher or lower levels may be routinely detected in certain tissues or cell types (e.g., cancerous and wounded tissues) or bodily fluids (e.g., serum, plasma, urine, synovial fluid and spinal fluid) or another tissue or sample taken from an individual having such a disorder, relative to the standard gene expression level, i.e., the expression level in healthy tissue or bodily fluid from an individual not having the disorder.

[0209] Embodiments of the invention encompass using polynucleotides and polypeptides (including fragments and variants thereof, and also antibodies, agonists and antagonists thereof) to prevent, diagnose, treat, or ameliorate a disease or disorder. In preferred embodiments, the present invention encompasses a method of preventing, diagnosing, treating, or ameliorating a disease or disorder related to one, two, three, or more, of the cells, tissues, and organs where the polynucleotide and/or polypeptide is expressed (for example, as indicated in Column 8 of Table 1B) or as indicated in the “Preferred Indications” column of Table 1D; comprising administering to a patient in which such prevention, diagnosis, treatment, or amelioration is desired a protein, nucleic acid, or antibody of the invention (or fragment or variant thereof) represented by Table 1A (in the same row as the disease or disorder to be treated is listed in the “Preferred Indications” column of Table 1D) in an amount effective to prevent, diagnose, treat, or ameliorate the disease or disorder. In another embodiment, the present invention also encompasses methods of preventing, diagnosing, treating, or ameliorating a disease or disorder related to one, two, three, or more, of the cells, tissues, and organs where the polynucleotide and/or polypeptide is expressed (for example, as indicated in Column 8 of Table 1B) or as indicated in the “Preferred Indications” column of Table 1D; comprising administering to a patient diagnostic or therapeutic molecules in combination with proteins, nucleic acids, or antibodies of the invention (or fragments or variants thereof) as represented by Table 1A.

[0210] The tissue distribution indicates that polynucleotides and polypeptides corresponding to this gene are useful for the treatment and/or detection of disorders associated with pregnancy including eclampsia, immune disorders and pulmonary disorders.

[0211] Features of Protein Encoded by Gene No: 39

[0212] The translation product of this gene shares sequence homology with ARL-6 interacting protein-1 (Aip-1).

[0213] This gene is expressed primarily in immune/hematopoietic, neural/sensory, reproductive, mixed fetal, and digestive tissues and to a lesser extent in connective/epithelial, cardiovascular, respiratory tissues.

[0214] Polynucleotides and polypeptides of the invention are useful as reagents for differential identification of the tissue(s) or cell type(s) present in a biological sample and for diagnosis of diseases and conditions which include but are not limited to: disorders in immune/hematopoietic, neural/sensory, reproductive, mixed fetal, and digestive systems. Similarly, polypeptides and antibodies directed to these polypeptides are useful in providing immunological probes for differential identification of the tissue(s) or cell type(s). For a number of disorders of the above tissues or cells, particularly of the immune/hematopoietic, neural/sensory, reproductive, mixed fetal, and digestive or bodily fluids (e.g., serum, plasma, urine, synovial fluid and spinal fluid) or another tissue or sample taken from an individual having such a disorder, relative to the standard gene expression level, i.e., the expression level in healthy tissue or bodily fluid from an individual not having the disorder.

[0215] Embodiments of the invention encompass using polynucleotides and polypeptides (including fragments and variants thereof, and also antibodies, agonists and antagonists thereof) to prevent, diagnose, treat, or ameliorate a disease or disorder. In preferred embodiments, the present invention encompasses a method of preventing, diagnosing, treating, or ameliorating a disease or disorder related to one, two, three, or more, of the cells, tissues, and organs where the polynucleotide and/or polypeptide is expressed (for example, as indicated in Column 8 of Table 1B) or as indicated in the “Preferred Indications” column of Table 1D; comprising administering to a patient in which such prevention, diagnosis, treatment, or amelioration is desired a protein, nucleic acid, or antibody of the invention (or fragment or variant thereof) represented by Table 1A (in the same row as the disease or disorder to be treated is listed in the “Preferred Indications” column of Table 1D) in an amount effective to prevent, diagnose, treat, or ameliorate the disease or disorder. In another embodiment, the present invention also encompasses methods of preventing, diagnosing, treating, or ameliorating a disease or disorder related to one, two, three, or more, of the cells, tissues, and organs where the polynucleotide and/or polypeptide is expressed (for example, as indicated in Column 8 of Table 1B) or as indicated in the “Preferred Indications” column of Table 1D; comprising administering to a patient diagnostic or therapeutic molecules in combination with proteins, nucleic acids, or antibodies of the invention (or fragments or variants thereof) as represented by Table 1A.

[0216] The tissue distribution and homology to ARL-6 interacting protein-1 (Aip-1) indicates that polynucleotides and polypeptides corresponding to this gene are useful for diagnosis and/or treatment of disorders in immune/hematopoietic, neural/sensory, reproductive, mixed fetal, and digestive systems.

[0217] Features of Protein Encoded by Gene No: 40

[0218] The translation product of this gene shares sequence homology with apolipoprotein D precursor which occurs in the macromolecular complex with lecithin-cholesterol acyltransferase. It is probably involved in the transport and binding of bilin and it appears to be able to transport a variety of ligands in a number of different contexts.

[0219] This gene is expressed primarily in neural/sensory, reproductive, musculoskeletal, digestive, immune/hematopoietic tissues and to a lesser extent in connective/epithelial tissues.

[0220] Polynucleotides and polypeptides of the invention are useful as reagents for differential identification of the tissue(s) or cell type(s) present in a biological sample and for diagnosis of diseases and conditions which include but are not limited to: disorders in neural/sensory, reproductive, musculoskeletal, digestive, immune/hematopoietic systems. Similarly, polypeptides and antibodies directed to these polypeptides are useful in providing immunological probes for differential identification of the tissue(s) or cell type(s). For a number of disorders of the above tissues or cells, particularly of the neural/sensory, reproductive, musculoskeletal, digestive, immune/hematopoietic tissues expression of this gene at significantly higher or lower levels may be routinely detected in certain tissues or cell types (e.g., cancerous and wounded tissues) or bodily fluids (e.g., serum, plasma, urine, synovial fluid and spinal fluid) or another tissue or sample taken from an individual having such a disorder, relative to the standard gene expression level, i.e., the expression level in healthy tissue or bodily fluid from an individual not having the disorder.

[0221] Embodiments of the invention encompass using polynucleotides and polypeptides (including fragments and variants thereof, and also antibodies, agonists and antagonists thereof) to prevent, diagnose, treat, or ameliorate a disease or disorder. In preferred embodiments, the present invention encompasses a method of preventing, diagnosing, treating, or ameliorating a disease or disorder related to one, two, three, or more, of the cells, tissues, and organs where the polynucleotide and/or polypeptide is expressed (for example, as indicated in Column 8 of Table 1B) or as indicated in the “Preferred Indications” column of Table 1D; comprising administering to a patient in which such prevention, diagnosis, treatment, or amelioration is desired a protein, nucleic acid, or antibody of the invention (or fragment or variant thereof) represented by Table 1A (in the same row as the disease or disorder to be treated is listed in the “Preferred Indications” column of Table 1D) in an amount effective to prevent, diagnose, treat, or ameliorate the disease or disorder. In another embodiment, the present invention also encompasses methods of preventing, diagnosing, treating, or ameliorating a disease or disorder related to one, two, three, or more, of the cells, tissues, and organs where the polynucleotide and/or polypeptide is expressed (for example, as indicated in Column 8 of Table 1B) or as indicated in the “Preferred Indications” column of Table 1D; comprising administering to a patient diagnostic or therapeutic molecules in combination with proteins, nucleic acids, or antibodies of the invention (or fragments or variants thereof) as represented by Table 1A.

[0222] The tissue distribution and protein homology indicate that polynucleotides and polypeptides corresponding to this gene are useful for diagnosis and/or treatment of disorders in neural/sensory, reproductive, musculoskeletal, digestive, immune/hematopoietic systems.

[0223] Features of Protein Encoded by Gene No: 41

[0224] The translation product of this gene shares the small interstitial sequence homology with Lumican precursor that belongs to proteoglycans family. Lumican is present in the extracellular matrix of human articular cartilage.

[0225] This gene is expressed primarily in Esophageal Cancer (ductal carcinoma).

[0226] Polynucleotides and polypeptides of the invention are useful as reagents for differential identification of the tissue(s) or cell type(s) present in a biological sample and for diagnosis of diseases and conditions which include but are not limited to: esophageal cancer. Similarly, polypeptides and antibodies directed to these polypeptides are useful in providing immunological probes for differential identification of the tissue(s) or cell type(s). For a number of disorders of the above tissues or cells, particularly of the esophageal, expression of this gene at significantly higher or lower levels may be routinely detected in certain tissues or cell types (e.g., cancerous and wounded tissues) or bodily fluids (e.g., serum, plasma, urine, synovial fluid and spinal fluid) or another tissue or sample taken from an individual having such a disorder, relative to the standard gene expression level, i.e., the expression level in healthy tissue or bodily fluid from an individual not having the disorder.

[0227] Embodiments of the invention encompass using polynucleotides and polypeptides (including fragments and variants thereof, and also antibodies, agonists and antagonists thereof) to prevent, diagnose, treat, or ameliorate a disease or disorder. In preferred embodiments, the present invention encompasses a method of preventing, diagnosing, treating, or ameliorating a disease or disorder related to one, two, three, or more, of the cells, tissues, and organs where the polynucleotide and/or polypeptide is expressed (for example, as indicated in Column 8 of Table 1B) or as indicated in the “Preferred Indications” column of Table 1D; comprising administering to a patient in which such prevention, diagnosis, treatment, or amelioration is desired a protein, nucleic acid, or antibody of the invention (or fragment or variant thereof) represented by Table 1A (in the same row as the disease or disorder to be treated is listed in the “Preferred Indications” column of Table 1D) in an amount effective to prevent, diagnose, treat, or ameliorate the disease or disorder. In another embodiment, the present invention also encompasses methods of preventing, diagnosing, treating, or ameliorating a disease or disorder related to one, two, three, or more, of the cells, tissues, and organs where the polynucleotide and/or polypeptide is expressed (for example, as indicated in Column 8 of Table 1B) or as indicated in the “Preferred Indications” column of Table 1D; comprising administering to a patient diagnostic or therapeutic molecules in combination with proteins, nucleic acids, or antibodies of the invention (or fragments or variants thereof) as represented by Table 1A.

[0228] The tissue distribution and homology to lumican precursor indicates that polynucleotides and polypeptides corresponding to this gene are useful for diagnosis and/or treatment of disorders in esophageal tissues.

[0229] Features of Protein Encoded by Gene No: 42

[0230] This gene is expressed primarily in lung cancer, heart and keratinocytes.

[0231] Polynucleotides and polypeptides of the invention are useful as reagents for differential identification of the tissue(s) or cell type(s) present in a biological sample and for diagnosis of diseases and conditions which include but are not limited to: pulmonary disorders including lung cancer, cardiovascular disorders and skin disorders. Similarly, polypeptides and antibodies directed to these polypeptides are useful in providing immunological probes for differential identification of the tissue(s) or cell type(s). For a number of disorders of the above tissues or cells, particularly of the pulmonary and cardiovascular systems, expression of this gene at significantly higher or lower levels may be routinely detected in certain tissues or cell types (e.g., cancerous and wounded tissues) or bodily fluids (e.g., serum, plasma, urine, synovial fluid and spinal fluid) or another tissue or sample taken from an individual having such a disorder, relative to the standard gene expression level, i.e., the expression level in healthy tissue or bodily fluid from an individual not having the disorder.

[0232] Embodiments of the invention encompass using polynucleotides and polypeptides (including fragments and variants thereof, and also antibodies, agonists and antagonists thereof) to prevent, diagnose, treat, or ameliorate a disease or disorder. In preferred embodiments, the present invention encompasses a method of preventing, diagnosing, treating, or ameliorating a disease or disorder related to one, two, three, or more, of the cells, tissues, and organs where the polynucleotide and/or polypeptide is expressed (for example, as indicated in Column 8 of Table 1B) or as indicated in the “Preferred Indications” column of Table 1D; comprising administering to a patient in which such prevention, diagnosis, treatment, or amelioration is desired a protein, nucleic acid, or antibody of the invention (or fragment or variant thereof) represented by Table 1A (in the same row as the disease or disorder to be treated is listed in the “Preferred Indications” column of Table 1D) in an amount effective to prevent, diagnose, treat, or ameliorate the disease or disorder. In another embodiment, the present invention also encompasses methods of preventing, diagnosing, treating, or ameliorating a disease or disorder related to one, two, three, or more, of the cells, tissues, and organs where the polynucleotide and/or polypeptide is expressed (for example, as indicated in Column 8 of Table 1B) or as indicated in the “Preferred Indications” column of Table 1D; comprising administering to a patient diagnostic or therapeutic molecules in combination with proteins, nucleic acids, or antibodies of the invention (or fragments or variants thereof) as represented by Table 1A.

[0233] The tissue distribution indicates that polynucleotides and polypeptides corresponding to this gene are useful for the treatment and/or detection of cardiovascular disorders including myocardial infarction, atherosclerosis; skin disorders such as psoriasis and eczema; pulmonary disorders such as lung cancer, cystic fibrosis, chronic obstructive pulmonary disease, asthma, pulmonary fibrosis, edema, embolism, and acute lung injury.

[0234] Features of Protein Encoded by Gene No: 43

[0235] The translation product of this gene shares sequence homology with ladinin, a basement membrane protein, which is thought to be important in intra-epidermal and dermal-epidermal cohesion for the integrity of the skin.

[0236] This gene is expressed primarily in connective/epithelial, digestive (e.g. colon), endometrial tumor tissues and to a lesser extent in Immune/Hematopoietic, and Respiratory tissues.

[0237] Polynucleotides and polypeptides of the invention are useful as reagents for differential identification of the tissue(s) or cell type(s) present in a biological sample and for diagnosis of diseases and conditions which include but are not limited to: autoimmune diseases, and disorders in connective/epithelial, digestive, and reproductive systems. Similarly, polypeptides and antibodies directed to these polypeptides are useful in providing immunological probes for differential identification of the tissue(s) or cell type(s). For a number of disorders of the above tissues or cells, particularly of the connective/epithelial, digestive, and reproductive, expression of this gene at significantly higher or lower levels may be routinely detected in certain tissues or cell types (e.g., cancerous and wounded tissues) or bodily fluids (e.g., serum, plasma, urine, synovial fluid and spinal fluid) or another tissue or sample taken from an individual having such a disorder, relative to the standard gene expression level, i.e., the expression level in healthy tissue or bodily fluid from an individual not having the disorder.

[0238] Embodiments of the invention encompass using polynucleotides and polypeptides (including fragments and variants thereof, and also antibodies, agonists and antagonists thereof) to prevent, diagnose, treat, or ameliorate a disease or disorder. In preferred embodiments, the present invention encompasses a method of preventing, diagnosing, treating, or ameliorating a disease or disorder related to one, two, three, or more, of the cells, tissues, and organs where the polynucleotide and/or polypeptide is expressed (for example, as indicated in Column 8 of Table 1B) or as indicated in the “Preferred Indications” column of Table 1D; comprising administering to a patient in which such prevention, diagnosis, treatment, or amelioration is desired a protein, nucleic acid, or antibody of the invention (or fragment or variant thereof) represented by Table 1A (in the same row as the disease or disorder to be treated is listed in the “Preferred Indications” column of Table 1D) in an amount effective to prevent, diagnose, treat, or ameliorate the disease or disorder. In another embodiment, the present invention also encompasses methods of preventing, diagnosing, treating, or ameliorating a disease or disorder related to one, two, three, or more, of the cells, tissues, and organs where the polynucleotide and/or polypeptide is expressed (for example, as indicated in Column 8 of Table 1B) or as indicated in the “Preferred Indications” column of Table 1D; comprising administering to a patient diagnostic or therapeutic molecules in combination with proteins, nucleic acids, or antibodies of the invention (or fragments or variants thereof) as represented by Table 1A.

[0239] The tissue distribution and homology to ladinin indicates that polynucleotides and polypeptides corresponding to this gene are useful for diagnosis and treatment in autoimmune diseases and disorders in connective/epithelial, digestive, and reproductive systems.

[0240] Features of Protein Encoded by Gene No: 44

[0241] The translation product of this gene shares sequence homology with Zn-alpha 2-glycoprotein that is present in several biological fluids and produced by a subtype of breast carcinomas, and this protein is thought to be involved in transport of non polymorphic substances.

[0242] This gene is expressed primarily in the liver.

[0243] Polynucleotides and polypeptides of the invention are useful as reagents for differential identification of the tissue(s) or cell type(s) present in a biological sample and for diagnosis of diseases and conditions which include but are not limited to liver disorders (such as, for example, liver cancer, hepatitis, etc.). Similarly, polypeptides and antibodies directed to these polypeptides are useful in providing immunological probes for differential identification of the tissue(s) or cell type(s). For a number of disorders of the above tissues or cells, particularly of the hepatic system, expression of this gene at significantly higher or lower levels may be routinely detected in certain tissues or cell types (e.g., cancerous and wounded tissues) or bodily fluids (e.g., serum, plasma, urine, synovial fluid and spinal fluid) or another tissue or sample taken from an individual having such a disorder, relative to the standard gene expression level, i.e., the expression level in healthy tissue or bodily fluid from an individual not having the disorder.

[0244] Embodiments of the invention encompass using polynucleotides and polypeptides (including fragments and variants thereof, and also antibodies, agonists and antagonists thereof) to prevent, diagnose, treat, or ameliorate a disease or disorder. In preferred embodiments, the present invention encompasses a method of preventing, diagnosing, treating, or ameliorating a disease or disorder related to one, two, three, or more, of the cells, tissues, and organs where the polynucleotide and/or polypeptide is expressed (for example, as indicated in Column 8 of Table 1B) or as indicated in the “Preferred Indications” column of Table 1D; comprising administering to a patient in which such prevention, diagnosis, treatment, or amelioration is desired a protein, nucleic acid, or antibody of the invention (or fragment or variant thereof) represented by Table 1A (in the same row as the disease or disorder to be treated is listed in the “Preferred Indications” column of Table 1D) in an amount effective to prevent, diagnose, treat, or ameliorate the disease or disorder. In another embodiment, the present invention also encompasses methods of preventing, diagnosing, treating, or ameliorating a disease or disorder related to one, two, three, or more, of the cells, tissues, and organs where the polynucleotide and/or polypeptide is expressed (for example, as indicated in Column 8 of Table 1B) or as indicated in the “Preferred Indications” column of Table 1D; comprising administering to a patient diagnostic or therapeutic molecules in combination with proteins, nucleic acids, or antibodies of the invention (or fragments or variants thereof) as represented by Table 1A.

[0245] The tissue distribution and protein homology indicate that polynucleotides and polypeptides corresponding to this gene are useful for detection, prevention, and treatment of liver disorders (for example, but not limited to, liver cancer and hepatitis).

[0246] Features of Protein Encoded by Gene No: 45

[0247] This gene is expressed primarily in reproductive, neural/sensory tissues and to a lesser extent in musculoskeletal, immune/hematopoietic tissues.

[0248] Polynucleotides and polypeptides of the invention are useful as reagents for differential identification of the tissue(s) or cell type(s) present in a biological sample and for diagnosis of diseases and conditions which include but are not limited to: disorders in reproductive, neural/sensory and musculoskeletal, immune/hematopoietic systems. Similarly, polypeptides and antibodies directed to these polypeptides are useful in providing immunological probes for differential identification of the tissue(s) or cell type(s). For a number of disorders of the above tissues or cells, particularly of the reproductive, neural/sensory, musculoskeletal, immune/hematopoietic, expression of this gene at significantly higher or lower levels may be routinely detected in certain tissues or cell types (e.g., cancerous and wounded tissues) or bodily fluids (e.g., serum, plasma, urine, synovial fluid and spinal fluid) or another tissue or sample taken from an individual having such a disorder, relative to the standard gene expression level, i.e., the expression level in healthy tissue or bodily fluid from an individual not having the disorder.

[0249] Embodiments of the invention encompass using polynucleotides and polypeptides (including fragments and variants thereof, and also antibodies, agonists and antagonists thereof) to prevent, diagnose, treat, or ameliorate a disease or disorder. In preferred embodiments, the present invention encompasses a method of preventing, diagnosing, treating, or ameliorating a disease or disorder related to one, two, three, or more, of the cells, tissues, and organs where the polynucleotide and/or polypeptide is expressed (for example, as indicated in Column 8 of Table 1B) or as indicated in the “Preferred Indications” column of Table 1D; comprising administering to a patient in which such prevention, diagnosis, treatment, or amelioration is desired a protein, nucleic acid, or antibody of the invention (or fragment or variant thereof) represented by Table 1A (in the same row as the disease or disorder to be treated is listed in the “Preferred Indications” column of Table 1D) in an amount effective to prevent, diagnose, treat, or ameliorate the disease or disorder. In another embodiment, the present invention also encompasses methods of preventing, diagnosing, treating, or ameliorating a disease or disorder related to one, two, three, or more, of the cells, tissues, and organs where the polynucleotide and/or polypeptide is expressed (for example, as indicated in Column 8 of Table 1B) or as indicated in the “Preferred Indications” column of Table 1D; comprising administering to a patient diagnostic or therapeutic molecules in combination with proteins, nucleic acids, or antibodies of the invention (or fragments or variants thereof) as represented by Table 1A.

[0250] The tissue distribution indicates that polynucleotides and polypeptides corresponding to this gene are useful for diagnosis and/or treatment of disorders in reproductive, neural/sensory and musculoskeletal, immune/hematopoietic systems.

[0251] Features of Protein Encoded by Gene No: 46

[0252] This gene is expressed primarily in esophageal cancer.

[0253] Polynucleotides and polypeptides of the invention are useful as reagents for differential identification of the tissue(s) or cell type(s) present in a biological sample and for diagnosis of diseases and conditions which include but are not limited to: disorders in esophageal tissues. Similarly, polypeptides and antibodies directed to these polypeptides are useful in providing immunological probes for differential identification of the tissue(s) or cell type(s). For a number of disorders of the above tissues or cells, particularly of the esophageal, expression of this gene at significantly higher or lower levels may be routinely detected in certain tissues or cell types (e.g., cancerous and wounded tissues) or bodily fluids (e.g., serum, plasma, urine, synovial fluid and spinal fluid) or another tissue or sample taken from an individual having such a disorder, relative to the standard gene expression level, i.e., the expression level in healthy tissue or bodily fluid from an individual not having the disorder.

[0254] Embodiments of the invention encompass using polynucleotides and polypeptides (including fragments and variants thereof, and also antibodies, agonists and antagonists thereof) to prevent, diagnose, treat, or ameliorate a disease or disorder. In preferred embodiments, the present invention encompasses a method of preventing, diagnosing, treating, or ameliorating a disease or disorder related to one, two, three, or more, of the cells, tissues, and organs where the polynucleotide and/or polypeptide is expressed (for example, as indicated in Column 8 of Table 1B) or as indicated in the “Preferred Indications” column of Table 1D; comprising administering to a patient in which such prevention, diagnosis, treatment, or amelioration is desired a protein, nucleic acid, or antibody of the invention (or fragment or variant thereof) represented by Table 1A (in the same row as the disease or disorder to be treated is listed in the “Preferred Indications” column of Table 1D) in an amount effective to prevent, diagnose, treat, or ameliorate the disease or disorder. In another embodiment, the present invention also encompasses methods of preventing, diagnosing, treating, or ameliorating a disease or disorder related to one, two, three, or more, of the cells, tissues, and organs where the polynucleotide and/or polypeptide is expressed (for example, as indicated in Column 8 of Table 1B) or as indicated in the “Preferred Indications” column of Table 1D; comprising administering to a patient diagnostic or therapeutic molecules in combination with proteins, nucleic acids, or antibodies of the invention (or fragments or variants thereof) as represented by Table 1A.

[0255] The tissue distribution indicates that polynucleotides and polypeptides corresponding to this gene are useful for diagnosis and/or treatment of disorders in esophageal tissues.

[0256] Features of Protein Encoded by Gene No: 47

[0257] The translation product of this gene shares sequence homology with Transmembrane 9 superfamily protein member 2 precursor.

[0258] This gene is expressed primarily in pancreatic cancers.

[0259] Polynucleotides and polypeptides of the invention are useful as reagents for differential identification of the tissue(s) or cell type(s) present in a biological sample and for diagnosis of diseases and conditions which include but are not limited to: pancreatic cancers. Similarly, polypeptides and antibodies directed to these polypeptides are useful in providing immunological probes for differential identification of the tissue(s) or cell type(s). For a number of disorders of the above tissues or cells, particularly of the digestive system, expression of this gene at significantly higher or lower levels may be routinely detected in certain tissues or cell types (e.g., cancerous and wounded tissues) or bodily fluids (e.g., serum, plasma, urine, synovial fluid and spinal fluid) or another tissue or sample taken from an individual having such a disorder, relative to the standard gene expression level, i.e., the expression level in healthy tissue or bodily fluid from an individual not having the disorder.

[0260] Embodiments of the invention encompass using polynucleotides and polypeptides (including fragments and variants thereof, and also antibodies, agonists and antagonists thereof) to prevent, diagnose, treat, or ameliorate a disease or disorder. In preferred embodiments, the present invention encompasses a method of preventing, diagnosing, treating, or ameliorating a disease or disorder related to one, two, three, or more, of the cells, tissues, and organs where the polynucleotide and/or polypeptide is expressed (for example, as indicated in Column 8 of Table 1B) or as indicated in the “Preferred Indications” column of Table 1D; comprising administering to a patient in which such prevention, diagnosis, treatment, or amelioration is desired a protein, nucleic acid, or antibody of the invention (or fragment or variant thereof) represented by Table 1A (in the same row as the disease or disorder to be treated is listed in the “Preferred Indications” column of Table 1D) in an amount effective to prevent, diagnose, treat, or ameliorate the disease or disorder. In another embodiment, the present invention also encompasses methods of preventing, diagnosing, treating, or ameliorating a disease or disorder related to one, two, three, or more, of the cells, tissues, and organs where the polynucleotide and/or polypeptide is expressed (for example, as indicated in Column 8 of Table 1B) or as indicated in the “Preferred Indications” column of Table 1D; comprising administering to a patient diagnostic or therapeutic molecules in combination with proteins, nucleic acids, or antibodies of the invention (or fragments or variants thereof) as represented by Table 1A.

[0261] Features of Protein Encoded by Gene No: 48

[0262] The translation product of this gene shares sequence homology with pancreatic elastase 2 precursor (Genbank Accession No. M16631).

[0263] This gene is expressed primarily in pancreatic cancers.

[0264] Polynucleotides and polypeptides of the invention are useful as reagents for differential identification of the tissue(s) or cell type(s) present in a biological sample and for diagnosis of diseases and conditions which include but are not limited to: pancreatic cancers. Similarly, polypeptides and antibodies directed to these polypeptides are useful in providing immunological probes for differential identification of the tissue(s) or cell type(s). For a number of disorders of the above tissues or cells, particularly of the digestive system, expression of this gene at significantly higher or lower levels may be routinely detected in certain tissues or cell types (e.g., cancerous and wounded tissues) or bodily fluids (e.g., serum, plasma, urine, synovial fluid and spinal fluid) or another tissue or sample taken from an individual having such a disorder, relative to the standard gene expression level, i.e., the expression level in healthy tissue or bodily fluid from an individual not having the disorder.

[0265] Embodiments of the invention encompass using polynucleotides and polypeptides (including fragments and variants thereof, and also antibodies, agonists and antagonists thereof) to prevent, diagnose, treat, or ameliorate a disease or disorder. In preferred embodiments, the present invention encompasses a method of preventing, diagnosing, treating, or ameliorating a disease or disorder related to one, two, three, or more, of the cells, tissues, and organs where the polynucleotide and/or polypeptide is expressed (for example, as indicated in Column 8 of Table 1B) or as indicated in the “Preferred Indications” column of Table 1D; comprising administering to a patient in which such prevention, diagnosis, treatment, or amelioration is desired a protein, nucleic acid, or antibody of the invention (or fragment or variant thereof) represented by Table 1A (in the same row as the disease or disorder to be treated is listed in the “Preferred Indications” column of Table 1D) in an amount effective to prevent, diagnose, treat, or ameliorate the disease or disorder. In another embodiment, the present invention also encompasses methods of preventing, diagnosing, treating, or ameliorating a disease or disorder related to one, two, three, or more, of the cells, tissues, and organs where the polynucleotide and/or polypeptide is expressed (for example, as indicated in Column 8 of Table 1B) or as indicated in the “Preferred Indications” column of Table 1D; comprising administering to a patient diagnostic or therapeutic molecules in combination with proteins, nucleic acids, or antibodies of the invention (or fragments or variants thereof) as represented by Table 1A.

[0266] Features of Protein Encoded by Gene No: 49

[0267] The translation product of this gene shares sequence homology with Oncostatin-M specific receptor beta subunit (Genbank Accession No. U60805).

[0268] This gene is expressed primarily in hepatocellular carcinoma.

[0269] Polynucleotides and polypeptides of the invention are useful as reagents for differential identification of the tissue(s) or cell type(s) present in a biological sample and for diagnosis of diseases and conditions which include but are not limited to hepatocellular carcinoma. Similarly, polypeptides and antibodies directed to these polypeptides are useful in providing immunological probes for differential identification of the tissue(s) or cell type(s). For a number of disorders of the above tissues or cells, particularly of the hepatic system, expression of this gene at significantly higher or lower levels may be routinely detected in certain tissues or cell types (e.g., cancerous and wounded tissues) or bodily fluids (e.g., serum, plasma, urine, synovial fluid and spinal fluid) or another tissue or sample taken from an individual having such a disorder, relative to the standard gene expression level, i.e., the expression level in healthy tissue or bodily fluid from an individual not having the disorder. Embodiments of the invention encompass using polynucleotides and polypeptides (including fragments and variants thereof, and also antibodies, agonists and antagonists thereof) to prevent, diagnose, treat, or ameliorate a disease or disorder. In preferred embodiments, the present invention encompasses a method of preventing, diagnosing, treating, or ameliorating a disease or disorder related to one, two, three, or more, of the cells, tissues, and organs where the polynucleotide and/or polypeptide is expressed (for example, as indicated in Column 8 of Table 1B) or as indicated in the “Preferred Indications” column of Table 1D; comprising administering to a patient in which such prevention, diagnosis, treatment, or amelioration is desired a protein, nucleic acid, or antibody of the invention (or fragment or variant thereof) represented by Table 1A (in the same row as the disease or disorder to be treated is listed in the “Preferred Indications” column of Table 1D) in an amount effective to prevent, diagnose, treat, or ameliorate the disease or disorder. In another embodiment, the present invention also encompasses methods of preventing, diagnosing, treating, or ameliorating a disease or disorder related to one, two, three, or more, of the cells, tissues, and organs where the polynucleotide and/or polypeptide is expressed (for example, as indicated in Column 8 of Table 1B) or as indicated in the “Preferred Indications” column of Table 1D; comprising administering to a patient diagnostic or therapeutic molecules in combination with proteins, nucleic acids, or antibodies of the invention (or fragments or variants thereof) as represented by Table 1A.

[0270] Features of Protein Encoded by Gene No: 50

[0271] The translation product of this gene shares sequence homology with Zn-alpha-2 glycoprotein and members of the MHC family.

[0272] This gene is expressed primarily in salivary gland and to a lesser extent in pancreas, gall bladder, ovary, and prostate.

[0273] Polynucleotides and polypeptides of the invention are useful as reagents for differential identification of the tissue(s) or cell type(s) present in a biological sample and for diagnosis of diseases and conditions which include but are not limited to: diabetes, endocrine, exocrine, digestive disorders, pancreatic cancer, and prostate cancer. Similarly, polypeptides and antibodies directed to these polypeptides are useful in providing immunological probes for differential identification of the tissue(s) or cell type(s). For a number of disorders of the above tissues or cells, particularly of the exocrine and endocrine pancreas and digestive systems, expression of this gene at significantly higher or lower levels may be routinely detected in certain tissues or cell types (e.g., cancerous and wounded tissues) or bodily fluids (e.g., serum, plasma, urine, synovial fluid and spinal fluid) or another tissue or sample taken from an individual having such a disorder, relative to the standard gene expression level, i.e., the expression level in healthy tissue or bodily fluid from an individual not having the disorder. Embodiments of the invention encompass using polynucleotides and polypeptides (including fragments and variants thereof, and also antibodies, agonists and antagonists thereof) to prevent, diagnose, treat, or ameliorate a disease or disorder. In preferred embodiments, the present invention encompasses a method of preventing, diagnosing, treating, or ameliorating a disease or disorder related to one, two, three, or more, of the cells, tissues, and organs where the polynucleotide and/or polypeptide is expressed (for example, as indicated in Column 8 of Table 1B) or as indicated in the “Preferred Indications” column of Table 1D; comprising administering to a patient in which such prevention, diagnosis, treatment, or amelioration is desired a protein, nucleic acid, or antibody of the invention (or fragment or variant thereof) represented by Table 1A (in the same row as the disease or disorder to be treated is listed in the “Preferred Indications” column of Table 1D) in an amount effective to prevent, diagnose, treat, or ameliorate the disease or disorder. In another embodiment, the present invention also encompasses methods of preventing, diagnosing, treating, or ameliorating a disease or disorder related to one, two, three, or more, of the cells, tissues, and organs where the polynucleotide and/or polypeptide is expressed (for example, as indicated in Column 8 of Table 1B) or as indicated in the “Preferred Indications” column of Table 1D; comprising administering to a patient diagnostic or therapeutic molecules in combination with proteins, nucleic acids, or antibodies of the invention (or fragments or variants thereof) as represented by Table 1A.

[0274] The tissue distribution and homology to a2-glycoprotein/histocompatabilty antigens indicates that polynucleotides and polypeptides corresponding to this gene are useful for treatment of glandular disorders especially those of the pancreas, gall bladder and salivary gland. Homology with components of the immune system suggest a therapeutic role for this protein in the diagnosis and treatment of pancreatitis, a chronic inflammatory condition of the pancreas, pancreatic tumors, diabetes as well as gall stones and other bile storage diseases as well as mumps, Sjogrens disease and other diseases of the salivary glands. Polynucleotides and/or polypeptides of the invention and/or antagonists thereof (especially neutralizing or antagonistic antibodies) may be used to treat, prevent, and/or ameliorate type II diabetes.

[0275] Additionally, in other embodiments, the polynucleotides and/or polypeptides corresponding to this gene and/or antagonists thereof (especially neutralizing or antagonistic antibodies) may be used to treat, prevent, or ameliorate conditions associated with type II diabetes mellitus, including, but not limited to, seizures, mental confusion, drowsiness, non-ketotic hyperglycemic-hyperosmolar coma, cardiovascular disease (e.g., heart disease, atherosclerosis, microvascular disease, hypertension, stroke, and other diseases and disorders as described in the “Cardiovascular Disorders” section below), dyslipidemia, kidney disease (e.g., renal failure, nephropathy other diseases and disorders as described in the “Renal Disorders” section below), endocrine disorders (as described in the “Endocrine Disorders” section below), obesity, nerve damage, neuropathy, vision impairment (e.g., diabetic retinopathy and blindness), ulcers and impaired wound healing, infections (e.g., infectious diseases and disorders as described in the “Infectious Diseases” section below, especially of the urinary tract and skin), carpal tunnel syndrome and Dupuytren's contracture.

[0276] In another embodiment, the polynucleotides and/or polypeptides of the invention and/or antagonists thereof (especially neutralizing or antagonistic antibodies) may be used to treat, prevent, and/or ameliorate diabetes and/or complication associated with diabetes. Complications associated with diabetes include: blindness (e.g., due to diabetic retinopathy), kidney disease (e.g., due to diabetic nephropathy), nerve disease (e.g., due to diabetic neuropathy) and amputations, heart disease and stroke, and impotence (e.g., due to diabetic neuropathy or blood vessel blockage.

[0277] In additional preferred embodiments, a polypeptide of the invention, or polynucleotides, antibodies, agonists, or antagonists corresponding to that polypeptide, may be used to regulate weight gain, weight loss, and/or obesity. In other embodiments, the polynucleotides and/or polypeptides of the invention and/or antagonists thereof (especially neutralizing or antagonistic antibodies) may be used to treat, prevent, and/or ameliorate other diseases or disorders described herein (See, e.g., “Biological Activities” section and the sections cross-referenced therein).

[0278] Features of Protein Encoded by Gene No: 51

[0279] The translation product of this gene shares sequence homology with aquaporin which is thought to be important in ionic regulation by acting as a water channel.

[0280] This gene is expressed primarily in normal pancreas and to a lesser extent in pancreatic cancer.

[0281] Polynucleotides and polypeptides of the invention are useful as reagents for differential identification of the tissue(s) or cell type(s) present in a biological sample and for diagnosis of diseases and conditions which include but are not limited to: diabetes and pancreatic cancer. Similarly, polypeptides and antibodies directed to these polypeptides are useful in providing immunological probes for differential identification of the tissue(s) or cell type(s). For a number of disorders of the above tissues or cells, particularly of the endocrine and exocrine pancreas, expression of this gene at significantly higher or lower levels may be routinely detected in certain tissues or cell types (e.g., cancerous and wounded tissues) or bodily fluids (e.g., serum, plasma, urine, synovial fluid and spinal fluid) or another tissue or sample taken from an individual having such a disorder, relative to the standard gene expression level, i.e., the expression level in healthy tissue or bodily fluid from an individual not having the disorder. Embodiments of the invention encompass using polynucleotides and polypeptides (including fragments and variants thereof, and also antibodies, agonists and antagonists thereof) to prevent, diagnose, treat, or ameliorate a disease or disorder. In preferred embodiments, the present invention encompasses a method of preventing, diagnosing, treating, or ameliorating a disease or disorder related to one, two, three, or more, of the cells, tissues, and organs where the polynucleotide and/or polypeptide is expressed (for example, as indicated in Column 8 of Table 1B) or as indicated in the “Preferred Indications” column of Table 1D; comprising administering to a patient in which such prevention, diagnosis, treatment, or amelioration is desired a protein, nucleic acid, or antibody of the invention (or fragment or variant thereof) represented by Table 1A (in the same row as the disease or disorder to be treated is listed in the “Preferred Indications” column of Table 1D) in an amount effective to prevent, diagnose, treat, or ameliorate the disease or disorder.

[0282] In another embodiment, the present invention also encompasses methods of preventing, diagnosing, treating, or ameliorating a disease or disorder related to one, two, three, or more, of the cells, tissues, and organs where the polynucleotide and/or polypeptide is expressed (for example, as indicated in Column 8 of Table 1B) or as indicated in the “Preferred Indications” column of Table 1D; comprising administering to a patient diagnostic or therapeutic molecules in combination with proteins, nucleic acids, or antibodies of the invention (or fragments or variants thereof) as represented by Table 1A.

[0283] The tissue distribution and homology to aquaporin indicates that polynucleotides and polypeptides corresponding to this gene are useful for the treatment of diabetes since this protein may regulate the ionic environment of pancreatic cells and the ionic environment is important for control of insulin release from the beta cells of the pancreas. The gene and its polypeptides may also be useful in the treatment of pancreatic cancer and other disorders of the pancreas such as pancreatitis, where the protein could be induced to increase the water flow in pancreatic ducts and thereby prevent damage by proteolytic enzymes. Polynucleotides and/or polypeptides of the invention and/or antagonists thereof (especially neutralizing or antagonistic antibodies) may be used to treat, prevent, and/or ameliorate type II diabetes. Additionally, in other embodiments, the polynucleotides and/or polypeptides corresponding to this gene and/or antagonists thereof (especially neutralizing or antagonistic antibodies) may be used to treat, prevent, or ameliorate conditions associated with type II diabetes mellitus, including, but not limited to, seizures, mental confusion, drowsiness, non-ketotic hyperglycemic-hyperosmolar coma, cardiovascular disease (e.g., heart disease, atherosclerosis, microvascular disease, hypertension, stroke, and other diseases and disorders (as described in the “Cardiovascular Disorders” section below), dyslipidemia, kidney disease (e.g., renal failure, nephropathy other diseases and disorders as described in the “Renal Disorders” section below), endocrine disorders (as described in the “Endocrine Disorders” section below), obesity, nerve damage, neuropathy, vision impairment (e.g., diabetic retinopathy and blindness), ulcers and impaired wound healing, infections (e.g., infectious diseases and disorders as described in the “Infectious Diseases” section below, especially of the urinary tract and skin), carpal tunnel syndrome and Dupuytren's contracture. In another embodiment, the polynucleotides and/or polypeptides of the invention and/or antagonists thereof (especially neutralizing or antagonistic antibodies) may be used to treat, prevent, and/or ameliorate diabetes and/or complication associated with diabetes. Complications associated with diabetes include: blindness (e.g., due to diabetic retinopathy), kidney disease (e.g., due to diabetic nephropathy), nerve disease (e.g., due to diabetic neuropathy) and amputations, heart disease and stroke, and impotence (e.g., due to diabetic neuropathy or blood vessel blockage. In additional preferred embodiments, a polypeptide of the invention, or polynucleotides, antibodies, agonists, or antagonists corresponding to that polypeptide, may be used to regulate weight gain, weight loss, and/or obesity. In other embodiments, the polynucleotides and/or polypeptides of the invention and/or antagonists thereof (especially neutralizing or antagonistic antibodies) may be used to treat, prevent, and/or ameliorate other diseases or disorders described herein (See, e.g, “Biological Activities” section and the sections cross-referenced therein).

[0284] Features of Protein Encoded by Gene No: 52

[0285] The translation product of this gene shares sequence homology with Human carbohydrate-associated protein CRBAP-3 which is thought to be important in immune regulation.

[0286] This gene is expressed primarily in normal and cancerous digestive, reproductive, and Immune/hematopoietic tissues and to a lesser extent in neural/sensory and endocrine tissues.

[0287] Polynucleotides and polypeptides of the invention are useful as reagents for differential identification of the tissue(s) or cell type(s) present in a biological sample and for diagnosis of diseases and conditions which include but are not limited to: autoimmune or inflammatory disorders, diabetes and metabolic discovers, gastrointestinal disorders, infectious disorders, reproductive disorders, neurological disorders, and cancer (particularly cancer of the gastrointestinal system). Similarly, polypeptides and antibodies directed to these polypeptides are useful in providing immunological probes for differential identification of the tissue(s) or cell type(s). For a number of disorders of the above tissues or cells, particularly of the immune/hematopoietic cells, muscle, kidney, gastrointestinal track, ovary, breast, adrenal, and neural tissues, expression of this gene at significantly higher or lower levels may be routinely detected in certain tissues or cell types (e.g., cancerous and wounded tissues) or bodily fluids (e.g., serum, plasma, urine, synovial fluid and spinal fluid) or another tissue or sample taken from an individual having such a disorder, relative to the standard gene expression level, i.e., the expression level in healthy tissue or bodily fluid from an individual not having the disorder.

[0288] Embodiments of the invention encompass using polynucleotides and polypeptides (including fragments and variants thereof, and also antibodies, agonists and antagonists thereof) to prevent, diagnose, treat, or ameliorate a disease or disorder. In preferred embodiments, the present invention encompasses a method of preventing, diagnosing, treating, or ameliorating a disease or disorder related to one, two, three, or more, of the cells, tissues, and organs where the polynucleotide and/or polypeptide is expressed (for example, as indicated in Column 8 of Table 1B) or as indicated in the “Preferred Indications” column of Table 1D; comprising administering to a patient in which such prevention, diagnosis, treatment, or amelioration is desired a protein, nucleic acid, or antibody of the invention (or fragment or variant thereof) represented by Table 1A (in the same row as the disease or disorder to be treated is listed in the “Preferred Indications” column of Table 1D) in an amount effective to prevent, diagnose, treat, or ameliorate the disease or disorder. In another embodiment, the present invention also encompasses methods of preventing, diagnosing, treating, or ameliorating a disease or disorder related to one, two, three, or more, of the cells, tissues, and organs where the polynucleotide and/or polypeptide is expressed (for example, as indicated in Column 8 of Table 1B) or as indicated in the “Preferred Indications” column of Table 1D; comprising administering to a patient diagnostic or therapeutic molecules in combination with proteins, nucleic acids, or antibodies of the invention (or fragments or variants thereof) as represented by Table 1A.

[0289] The tissue distribution and homology to Human carbohydrate-associated protein CRBAP-3 indicates that polynucleotides and polypeptides corresponding to this gene are useful for the diagnosis, treatment or prevention of disorders of the digestive/metabolic, reproductive, Immune/hematopoietic, neural/sensory and endocrine systems.

[0290] Features of Protein Encoded by Gene No: 53

[0291] The translation product of this gene shares sequence homology with colipase which is thought to be important in the correct digestive degradation of triglycerides.

[0292] This gene is expressed primarily in normal pancreas and cancer of the pancreas.

[0293] Polynucleotides and polypeptides of the invention are useful as reagents for differential identification of the tissue(s) or cell type(s) present in a biological sample and for diagnosis of diseases and conditions which include but are not limited to diabetes, obesity, and other disorders related to diabetes. Similarly, polypeptides and antibodies directed to these polypeptides are useful in providing immunological probes for differential identification of the tissue(s) or cell type(s). For a number of disorders of the above tissues or cells, particularly of the pancreas, expression of this gene at significantly higher or lower levels may be routinely detected in certain tissues or cell types (e.g., pancreas, cancerous and wounded tissues) or bodily fluids (e.g., serum, plasma, urine, synovial fluid and spinal fluid) or another tissue or sample taken from an individual having such a disorder, relative to the standard gene expression level, i.e., the expression level in healthy tissue or bodily fluid from an individual not having the disorder.

[0294] Embodiments of the invention encompass using polynucleotides and polypeptides (including fragments and variants thereof, and also antibodies, agonists and antagonists thereof) to prevent, diagnose, treat, or ameliorate a disease or disorder. In preferred embodiments, the present invention encompasses a method of preventing, diagnosing, treating, or ameliorating a disease or disorder related to one, two, three, or more, of the cells, tissues, and organs where the polynucleotide and/or polypeptide is expressed (for example, as indicated in Column 8 of Table 1B) or as indicated in the “Preferred Indications” column of Table 1D; comprising administering to a patient in which such prevention, diagnosis, treatment, or amelioration is desired a protein, nucleic acid, or antibody of the invention (or fragment or variant thereof) represented by Table 1A (in the same row as the disease or disorder to be treated is listed in the “Preferred Indications” column of Table 1D) in an amount effective to prevent, diagnose, treat, or ameliorate the disease or disorder. In another embodiment, the present invention also encompasses methods of preventing, diagnosing, treating, or ameliorating a disease or disorder related to one, two, three, or more, of the cells, tissues, and organs where the polynucleotide and/or polypeptide is expressed (for example, as indicated in Column 8 of Table 1B) or as indicated in the “Preferred Indications” column of Table 1D; comprising administering to a patient diagnostic or therapeutic molecules in combination with proteins, nucleic acids, or antibodies of the invention (or fragments or variants thereof) as represented by Table 1A.

[0295] The tissue distribution and homology to colipase indicates that polynucleotides and polypeptides corresponding to this gene are useful for the diagnosis, treatment and prevention of type II diabetes, obesity, lipodystrophies and other diseases of energy metabolism as well as diet related diarrhea. Colipases are known to be important for correct lipid digestion and metabolism, therefore, administration may be useful for lowering serum triglycerides and raising free fatty acid levels—such changes may be therapeutically beneficial in treatment of obesity where these components may mediate satiety. Polynucleotides and/or polypeptides of the invention and/or antagonists thereof (especially neutralizing or antagonistic antibodies) may be used to treat, prevent, and/or ameliorate type II diabetes. Additionally, in other embodiments, the polynucleotides and/or polypeptides corresponding to this gene and/or antagonists thereof (especially neutralizing or antagonistic antibodies) may be used to treat, prevent, or ameliorate conditions associated with type II diabetes mellitus, including, but not limited to, seizures, mental confusion, drowsiness, non-ketotic hyperglycemic-hyperosmolar coma, cardiovascular disease (e.g., heart disease, atherosclerosis, microvascular disease, hypertension, stroke, and other diseases and disorders (as described in the “Cardiovascular Disorders” section below), dyslipidemia, kidney disease (e.g., renal failure, nephropathy other diseases and disorders as described in the “Renal Disorders” section below), endocrine disorders (as described in the “Endocrine Disorders” section below), obesity, nerve damage, neuropathy, vision impairment (e.g., diabetic retinopathy and blindness), ulcers and impaired wound healing, infections (e.g., infectious diseases and disorders as described in the “Infectious Diseases” section below, especially of the urinary tract and skin), carpal tunnel syndrome and Dupuytren's contracture. In another embodiment, the polynucleotides and/or polypeptides of the invention and/or antagonists thereof (especially neutralizing or antagonistic antibodies) may be used to treat, prevent, and/or ameliorate diabetes and/or complication associated with diabetes. Complications associated with diabetes include: blindness (e.g., due to diabetic retinopathy), kidney disease (e.g., due to diabetic nephropathy), nerve disease (e.g., due to diabetic neuropathy) and amputations, heart disease and stroke, and impotence (e.g., due to diabetic neuropathy or blood vessel blockage. In additional preferred embodiments, a polypeptide of the invention, or polynucleotides, antibodies, agonists, or antagonists corresponding to that polypeptide, may be used to regulate weight gain, weight loss, and/or obesity. In other embodiments, the polynucleotides and/or polypeptides of the invention and/or antagonists thereof (especially neutralizing or antagonistic antibodies) may be used to treat, prevent, and/or ameliorate other diseases or disorders described herein (See, e.g., “Biological Activities” section and the sections cross-referenced therein).

[0296] Features of Protein Encoded by Gene No: 54

[0297] The translation product of this gene shares sequence homology with pancreatic colipase which is thought to be important in triglyceride catabolism and fat digestion.

[0298] This gene is expressed primarily in pancreas.

[0299] Polynucleotides and polypeptides of the invention are useful as reagents for differential identification of the tissue(s) or cell type(s) present in a biological sample and for diagnosis of diseases and conditions which include but are not limited to diabetes and obesity. Similarly, polypeptides and antibodies directed to these polypeptides are useful in providing immunological probes for differential identification pancreatic tissue. For a number of disorders of the digestive system (e.g. diabetes), particularly of the endocrine/energy/metabolism regulatory systems, expression of this gene at significantly higher or lower levels may be routinely detected in certain tissues or cell types (e.g., cancerous and wounded tissues) or bodily fluids (e.g., serum, plasma, urine, synovial fluid and spinal fluid) or another tissue or sample taken from an individual having such a disorder, relative to the standard gene expression level, i.e., the expression level in healthy tissue or bodily fluid from an individual not having the disorder.

[0300] Embodiments of the invention encompass using polynucleotides and polypeptides (including fragments and variants thereof, and also antibodies, agonists and antagonists thereof) to prevent, diagnose, treat, or ameliorate diabetes and/or obesity disorders. In preferred embodiments, the present invention encompasses a method of preventing, diagnosing, treating, or ameliorating a disease or disorder related to one, two, three, or more, of the cells, tissues, and organs where the polynucleotide and/or polypeptide is expressed (for example, as indicated in Column 8 of Table 1B) or as indicated in the “Preferred Indications” column of Table 1D; comprising administering to a patient in which such prevention, diagnosis, treatment, or amelioration is desired a protein, nucleic acid, or antibody of the invention (or fragment or variant thereof) represented by Table 1A (in the same row as the disease or disorder to be treated is listed in the “Preferred Indications” column of Table 1D) in an amount effective to prevent, diagnose, treat, or ameliorate the disease or disorder. In another embodiment, the present invention also encompasses methods of preventing, diagnosing, treating, or ameliorating a disease or disorder related to one, two, three, or more, of the cells, tissues, and organs where the polynucleotide and/or polypeptide is expressed (for example, as indicated in Column 8 of Table 1B) or as indicated in the “Preferred Indications” column of Table 1D; comprising administering to a patient diagnostic or therapeutic molecules in combination with proteins, nucleic acids, or antibodies of the invention (or fragments or variants thereof) as represented by Table 1A.

[0301] The tissue distribution and homology to colipase indicates that polynucleotides and polypeptides corresponding to this gene are useful for the diagnosis, treatment and prevention of diabetes, obesity, lipodystrophies and other diseases of energy metabolism as well as diet related diarrhea, since colipases are known to be important for correct lipid digestion and metabolism. Administration may be useful for lowering serum triglycerides and raising free fatty acid levels. Polynucleotides and/or polypeptides of the invention and/or antagonists thereof (especially neutralizing or antagonistic antibodies) may be used to treat, prevent, and/or ameliorate type II diabetes. Additionally, in other embodiments, the polynucleotides and/or polypeptides corresponding to this gene and/or antagonists thereof (especially neutralizing or antagonistic antibodies) may be used to treat, prevent, or ameliorate conditions associated with type II diabetes mellitus, including, but not limited to, seizures, mental confusion, drowsiness, non-ketotic hyperglycemic-hyperosmolar coma, cardiovascular disease (e.g., heart disease, atherosclerosis, microvascular disease, hypertension, stroke, and other diseases and disorders (as described in the “Cardiovascular Disorders” section below), dyslipidemia, kidney disease (e.g., renal failure, nephropathy other diseases and disorders as described in the “Renal Disorders” section below), endocrine disorders (as described in the “Endocrine Disorders” section below), obesity, nerve damage, neuropathy, vision impairment (e.g., diabetic retinopathy and blindness), ulcers and impaired wound healing, infections (e.g., infectious diseases and disorders as described in the “Infectious Diseases” section below, especially of the urinary tract and skin), carpal tunnel syndrome and Dupuytren's contracture. In another embodiment, the polynucleotides and/or polypeptides of the invention and/or antagonists thereof (especially neutralizing or antagonistic antibodies) may be used to treat, prevent, and/or ameliorate diabetes and/or complication associated with diabetes. Complications associated with diabetes include: blindness (e.g., due to diabetic retinopathy), kidney disease (e.g., due to diabetic nephropathy), nerve disease (e.g., due to diabetic neuropathy) and amputations, heart disease and stroke, and impotence (e.g., due to diabetic neuropathy or blood vessel blockage. In additional preferred embodiments, a polypeptide of the invention, or polynucleotides, antibodies, agonists, or antagonists corresponding to that polypeptide, may be used to regulate weight gain, weight loss, and/or obesity. In other embodiments, the polynucleotides and/or polypeptides of the invention and/or antagonists thereof (especially neutralizing or antagonistic antibodies) may be used to treat, prevent, and/or ameliorate other diseases or disorders described herein (See, e.g., “Biological Activities” section and the sections cross-referenced therein).

[0302] Features of Protein Encoded by Gene No: 55

[0303] The translation product of this gene shares sequence homology with the human bone marrow stromal cell surface protein BST-2 (pir|A56836|A56836), which is thought to be important in important in pre-B cells growth and development.

[0304] This gene is expressed primarily in pancreas (normal and cancerous) and esophagus (normal and cancerous).

[0305] Polynucleotides and polypeptides of the invention are useful as reagents for differential identification of the tissue(s) or cell type(s) present in a biological sample and for diagnosis of diseases and conditions which include but are not limited to: diabetes, pancreatitis, digestive disorders, Gastro-esophageal Reflux Disease (GERD), esophageal cancer. Similarly, polypeptides and antibodies directed to these polypeptides are useful in providing immunological probes for differential identification of the tissue(s) or cell type(s). For a number of disorders of the above tissues or cells, particularly of the digestive systems, pancreas, esophagus, expression of this gene at significantly higher or lower levels may be routinely detected in certain tissues or cell types (e.g., cancerous and wounded tissues) or bodily fluids (e.g., serum, plasma, urine, synovial fluid and spinal fluid) or another tissue or sample taken from an individual having such a disorder, relative to the standard gene expression level, i.e., the expression level in healthy tissue or bodily fluid from an individual not having the disorder.

[0306] Embodiments of the invention encompass using polynucleotides and polypeptides (including fragments and variants thereof, and also antibodies, agonists and antagonists thereof) to prevent, diagnose, treat, or ameliorate a disease or disorder. In preferred embodiments, the present invention encompasses a method of preventing, diagnosing, treating, or ameliorating a disease or disorder related to one, two, three, or more, of the cells, tissues, and organs where the polynucleotide and/or polypeptide is expressed (for example, as indicated in Column 8 of Table 1B) or as indicated in the “Preferred Indications” column of Table 1D; comprising administering to a patient in which such prevention, diagnosis, treatment, or amelioration is desired a protein, nucleic acid, or antibody of the invention (or fragment or variant thereof) represented by Table 1A (in the same row as the disease or disorder to be treated is listed in the “Preferred Indications” column of Table 1D) in an amount effective to prevent, diagnose, treat, or ameliorate the disease or disorder. In another embodiment, the present invention also encompasses methods of preventing, diagnosing, treating, or ameliorating a disease or disorder related to one, two, three, or more, of the cells, tissues, and organs where the polynucleotide and/or polypeptide is expressed (for example, as indicated in Column 8 of Table 1B) or as indicated in the “Preferred Indications” column of Table 1D; comprising administering to a patient diagnostic or therapeutic molecules in combination with proteins, nucleic acids, or antibodies of the invention (or fragments or variants thereof) as represented by Table 1A.

[0307] The tissue distribution and homology to bone marrow stromal cell surface protein BST-2 indicates that polynucleotides and polypeptides corresponding to this gene are useful for diagnosis and/or treatment of diabetes, digestive disorders, gastric reflux (GERD), pancreatitis, esophageal tumors, and pancreatic tumors.

[0308] Features of Protein Encoded by Gene No: 56

[0309] This gene is expressed primarily in pancreas (normal and cancerous).

[0310] Polynucleotides and polypeptides of the invention are useful as reagents for differential identification of the tissue(s) or cell type(s) present in a biological sample and for diagnosis of diseases and conditions which include but are not limited to: diabetes, pancreatitis, pancreatic tumors, endocrine and digestive disorders. Similarly, polypeptides and antibodies directed to these polypeptides are useful in providing immunological probes for differential identification of the tissue(s) or cell type(s). For a number of disorders of the above tissues or cells, particularly of the exocrine and endocrine pancreas, digestive systems, expression of this gene at significantly higher or lower levels may be routinely detected in certain tissues or cell types (e.g., pancreas, cancerous and wounded tissues) or bodily fluids (e.g., serum, plasma, urine, synovial fluid and spinal fluid) or another tissue or sample taken from an individual having such a disorder, relative to the standard gene expression level, i.e., the expression level in healthy tissue or bodily fluid from an individual not having the disorder.

[0311] Embodiments of the invention encompass using polynucleotides and polypeptides (including fragments and variants thereof, and also antibodies, agonists and antagonists thereof) to prevent, diagnose, treat, or ameliorate a disease or disorder. In preferred embodiments, the present invention encompasses a method of preventing, diagnosing, treating, or ameliorating a disease or disorder related to one, two, three, or more, of the cells, tissues, and organs where the polynucleotide and/or polypeptide is expressed (for example, as indicated in Column 8 of Table 1B) or as indicated in the “Preferred Indications” column of Table 1D; comprising administering to a patient in which such prevention, diagnosis, treatment, or amelioration is desired a protein, nucleic acid, or antibody of the invention (or fragment or variant thereof) represented by Table 1A (in the same row as the disease or disorder to be treated is listed in the “Preferred Indications” column of Table 1D) in an amount effective to prevent, diagnose, treat, or ameliorate the disease or disorder. In another embodiment, the present invention also encompasses methods of preventing, diagnosing, treating, or ameliorating a disease or disorder related to one, two, three, or more, of the cells, tissues, and organs where the polynucleotide and/or polypeptide is expressed (for example, as indicated in Column 8 of Table 1B) or as indicated in the “Preferred Indications” column of Table 1D; comprising administering to a patient diagnostic or therapeutic molecules in combination with proteins, nucleic acids, or antibodies of the invention (or fragments or variants thereof) as represented by Table 1A.

[0312] Polynucleotides and/or polypeptides of the invention and/or antagonists thereof (especially neutralizing or antagonistic antibodies) may be used to treat, prevent, and/or ameliorate type II diabetes, pancreatitis, pancreatic tumors, and digestive disorders. Additionally, in other embodiments, the polynucleotides and/or polypeptides corresponding to this gene and/or antagonists thereof (especially neutralizing or antagonistic antibodies) may be used to treat, prevent, or ameliorate conditions associated with type II diabetes mellitus, including, but not limited to, seizures, mental confusion, drowsiness, non-ketotic hyperglycemic-hyperosmolar coma, cardiovascular disease (e.g., heart disease, atherosclerosis, microvascular disease, hypertension, stroke, and other diseases and disorders as described in the “Cardiovascular Disorders” section below), dyslipidemia, kidney disease (e.g., renal failure, nephropathy other diseases and disorders as described in the “Renal Disorders” section below), endocrine disorders (as described in the “Endocrine Disorders” section below), obesity, nerve damage, neuropathy, vision impairment (e.g., diabetic retinopathy and blindness), ulcers and impaired wound healing, infections (e.g., infectious diseases and disorders as described in the “Infectious Diseases” section below, especially of the urinary tract and skin), carpal tunnel syndrome and Dupuytren's contracture. In another embodiment, the polynucleotides and/or polypeptides of the invention and/or antagonists thereof (especially neutralizing or antagonistic antibodies) may be used to treat, prevent, and/or ameliorate diabetes and/or complication associated with diabetes. Complications associated with diabetes include: blindness (e.g., due to diabetic retinopathy), kidney disease (e.g., due to diabetic nephropathy), nerve disease (e.g., due to diabetic neuropathy) and amputations, heart disease and stroke, and impotence (e.g., due to diabetic neuropathy or blood vessel blockage. In additional preferred embodiments, a polypeptide of the invention, or polynucleotides, antibodies, agonists, or antagonists corresponding to that polypeptide, may be used to regulate weight gain, weight loss, and/or obesity. In other embodiments, the polynucleotides and/or polypeptides of the invention and/or antagonists thereof (especially neutralizing or antagonistic antibodies) may be used to treat, prevent, and/or ameliorate other diseases or disorders described herein (See, e.g., “Biological Activities” section and the sections cross-referenced therein).

[0313] Features of Protein Encoded by Gene No: 57

[0314] The translation product of this gene shares sequence homology with human pHL E1F1 (a member of the proline rich family of proteins).

[0315] This gene is expressed primarily in digestive tissues, especially palate, both normal and cancerous, and to a lesser extent in other digestive tissues including larynx, salivary gland, and tongue tumors, and esophageal cancer.

[0316] Polynucleotides and polypeptides of the invention are useful as reagents for differential identification of the tissue(s) or cell type(s) present in a biological sample and for diagnosis of diseases and conditions which include but are not limited to diseases of the digestive system, including cancer and other proliferative disorders, and especially of the palate. Similarly, polypeptides and antibodies directed to these polypeptides are useful in providing immunological probes for differential identification of the tissue(s) or cell type(s). For a number of disorders of the above tissues or cells, particularly of the digestive system (e.g. esophagus), expression of this gene at significantly higher or lower levels may be routinely detected in certain tissues or cell types (e.g., cancerous and wounded tissues) or bodily fluids (e.g., serum, plasma, urine, synovial fluid and spinal fluid) or another tissue or sample taken from an individual having such a disorder, relative to the standard gene expression level, i.e., the expression level in healthy tissue or bodily fluid from an individual not having the disorder.

[0317] Embodiments of the invention encompass using polynucleotides and polypeptides (including fragments and variants thereof, and also antibodies, agonists, and antagonists thereof) to prevent, diagnose, treat, or ameliorate a disease or disorder. In preferred embodiments, the present invention encompasses a method of preventing, diagnosing, treating, or ameliorating a disease or disorder (for example, as indicated in the “Preferred Indications” column of Tables 1D, and 1E) related to one, two, three, or more, of the cells, tissues, and organs where the polynucleotide and/or polypeptide is expressed (for example, as indicated in the “Tissue Distribution” column of Table 1B); comprising administering to a patient in which such prevention, diagnosis, treatment, or amelioration is desired a protein, nucleic acid, or antibody of the invention (or fragment or variant thereof) represented by Tables 1A, and 1B, in an amount effective to prevent, diagnose, treat, or ameliorate the indicated disease or disorder.

[0318] In another embodiment, the present invention also encompasses methods of preventing, diagnosing, treating, or ameliorating a disease or disorder related to one, two, three, or more, of the cells, tissues, and organs where the polynucleotide and/or polypeptide is expressed (for example, as indicated in the “Tissue Distribution” column of Table 1B) or as indicated in the “Preferred Indications” column of Tables 1D, and 1E; comprising administering to a patient diagnostic or therapeutic molecules in combination with proteins, nucleic acids, or antibodies of the invention (or fragments or variants thereof) as represented by Tables 1A, and 1B.

[0319] The tissue distribution and homology to the proline-rich-protein superfamily, indicates that polynucleotides and polypeptides corresponding to this gene are useful for diagnosis and treatment of cancer and other proliferative disorders, particularly of the digestive system, especially the palate.

[0320] Features of Protein Encoded by Gene No: 58

[0321] The translation product of this gene shares sequence homology with SwissProt entry Q15121, a putative fatty acid desaturase MLD, a member of the Fatty Acid Desaturase family (PFAM PF00487), which is involved in metabolism of fatty acids. Members of this family reduce the saturation of fatty acids by catalyzing the formation of double bonds at the delta position.

[0322] This gene is expressed primarily in endothelial cells (breast cancer, rectum, skin) and/or digestive tissues and to a lesser extent in a variety of other tissues.

[0323] Polynucleotides and polypeptides of the invention are useful as reagents for differential identification of the tissue(s) or cell type(s) present in a biological sample and for diagnosis of diseases and conditions which include but are not limited to: cancer and other proliferative disorders particularly of endothelial tissues and especially digestive epithelium. Similarly, polypeptides and antibodies directed to these polypeptides are useful in providing immunological probes for differential identification of the tissue(s) or cell type(s). For a number of disorders of the above tissues or cells, particularly of the digestive system, expression of this gene at significantly higher or lower levels may be routinely detected in certain tissues or cell types (e.g., cancerous and wounded tissues) or bodily fluids (e.g., serum, plasma, urine, synovial fluid and spinal fluid) or another tissue or sample taken from an individual having such a disorder, relative to the standard gene expression level, i.e., the expression level in healthy tissue or bodily fluid from an individual not having the disorder. Supernatants from transient transfections of this gene have successfully induced production of VCAM in HUVEC cells (Human Umbilical Vein Epithelial Cells), strongly suggesting a role for the protein product of this gene in control of growth/differentiation of endothelial cells.

[0324] Embodiments of the invention encompass using polynucleotides and polypeptides (including fragments and variants thereof, and also antibodies, agonists, and antagonists thereof) to prevent, diagnose, treat, or ameliorate a disease or disorder. In preferred embodiments, the present invention encompasses a method of preventing, diagnosing, treating, or ameliorating a disease or disorder (for example, as indicated in the “Preferred Indications” column of Tables 1D, and 1E) related to one, two, three, or more, of the cells, tissues, and organs where the polynucleotide and/or polypeptide is expressed (for example, as indicated in the “Tissue Distribution” column of Table 1B); comprising administering to a patient in which such prevention, diagnosis, treatment, or amelioration is desired a protein, nucleic acid, or antibody of the invention (or fragment or variant thereof) represented by Tables 1A, and 1B, in an amount effective to prevent, diagnose, treat, or ameliorate the indicated disease or disorder.

[0325] In another embodiment, the present invention also encompasses methods of preventing, diagnosing, treating, or ameliorating a disease or disorder related to one, two, three, or more, of the cells, tissues, and organs where the polynucleotide and/or polypeptide is expressed (for example, as indicated in the “Tissue Distribution” column of Table 1B) or as indicated in the “Preferred Indications” column of Tables 1D, and 1E; comprising administering to a patient diagnostic or therapeutic molecules in combination with proteins, nucleic acids, or antibodies of the invention (or fragments or variants thereof) as represented by Tables 1A, and 1B.

[0326] The tissue distribution, homology to a fatty-acid desaturase and VCAM induction activity indicates that polynucleotides and polypeptides corresponding to this gene are useful for diagnosis and treatment of cancer and other proliferative disorders of the digestive and other endothelium.

[0327] Features of Protein Encoded by Gene No: 59

[0328] The translation product of this gene shares sequence homology with placental protein P11 which is thought to function as a protease and contains two somatomedin domains which are involved in extracellular matrix binding.

[0329] This gene is expressed primarily in placenta and to a lesser extent in esophagus (normal and cancerous), heart, brain and epithelia.

[0330] Polynucleotides and polypeptides of the invention are useful as reagents for differential identification of the tissue(s) or cell type(s) present in a biological sample and for diagnosis of diseases and conditions which include but are not limited to cancer. Similarly, polypeptides and antibodies directed to these polypeptides are useful in providing immunological probes for differential identification of the tissue(s) or cell type(s). For a number of disorders of the above tissues or cells, particularly of the gastrointestinal tract and other epithelial tissues, expression of this gene at significantly higher or lower levels may be routinely detected in certain tissues or cell types (e.g., cancerous and wounded tissues) or bodily fluids (e.g., serum, plasma, urine, synovial fluid and spinal fluid) or another tissue or sample taken from an individual having such a disorder, relative to the standard gene expression level, i.e., the expression level in healthy tissue or bodily fluid from an individual not having the disorder.

[0331] Embodiments of the invention encompass using polynucleotides and polypeptides (including fragments and variants thereof, and also antibodies, agonists, and antagonists thereof) to prevent, diagnose, treat, or ameliorate a disease or disorder. In preferred embodiments, the present invention encompasses a method of preventing, diagnosing, treating, or ameliorating a disease or disorder (for example, as indicated in the “Preferred Indications” column of Tables 1D, and 1E) related to one, two, three, or more, of the cells, tissues, and organs where the polynucleotide and/or polypeptide is expressed (for example, as indicated in the “Tissue Distribution” column of Table 1B); comprising administering to a patient in which such prevention, diagnosis, treatment, or amelioration is desired a protein, nucleic acid, or antibody of the invention (or fragment or variant thereof) represented by Tables 1A, and 1B, in an amount effective to prevent, diagnose, treat, or ameliorate the indicated disease or disorder.

[0332] In another embodiment, the present invention also encompasses methods of preventing, diagnosing, treating, or ameliorating a disease or disorder related to one, two, three, or more, of the cells, tissues, and organs where the polynucleotide and/or polypeptide is expressed (for example, as indicated in the “Tissue Distribution” column of Table 1B) or as indicated in the “Preferred Indications” column of Tables 1D, and 1E; comprising administering to a patient diagnostic or therapeutic molecules in combination with proteins, nucleic acids, or antibodies of the invention (or fragments or variants thereof) as represented by Tables 1A, and 1B.

[0333] The tissue distribution and homology to P11 indicates that polynucleotides and polypeptides corresponding to this gene are useful for diagnosis, staging and therapy of tumors of epithelial origin, especially of the gastrointestinal tract. The gene may be used to influence cell-cell or cell-extracellular matrix interactions and therefore alter the metastatic potential of tumors. Alternately inhibitors of this molecule (either protease inhibitors or inhibitors of the somatomedin binding domains) may inhibit this molecule; this molecule is therefore a target for small molecule blockade. Alternately, antibodies raised against this molecule may prove therapeutically useful to inhibit the function of this molecule by immunotherapy.

[0334] Features of Protein Encoded by Gene No: 60

[0335] The translation product of this gene shares sequence homology with leucine rich glycoprotein which is thought to be important in granulocyte differentiation.

[0336] This gene is expressed primarily in esophagus-disseminated adenocarcinoma, and to a lesser extent, in liver, activated neutrophils, and primary dendritic cells.

[0337] Polynucleotides and polypeptides of the invention are useful as reagents for differential identification of the tissue(s) or cell type(s) present in a biological sample and for diagnosis of diseases and conditions which include but are not limited to cancer and other neoplasms. Similarly, polypeptides and antibodies directed to these polypeptides are useful in providing immunological probes for differential identification of the tissue(s) or cell type(s). For a number of disorders of the above tissues or cells, particularly of the gastrointestinal tract including the esophagus, expression of this gene at significantly higher or lower levels may be routinely detected in certain tissues or cell types (e.g., cancerous and wounded tissues) or bodily fluids (e.g., serum, plasma, urine, synovial fluid and spinal fluid) or another tissue or sample taken from an individual having such a disorder, relative to the standard gene expression level, i.e., the expression level in healthy tissue or bodily fluid from an individual not having the disorder.

[0338] Embodiments of the invention encompass using polynucleotides and polypeptides (including fragments and variants thereof, and also antibodies, agonists, and antagonists thereof) to prevent, diagnose, treat, or ameliorate a disease or disorder. In preferred embodiments, the present invention encompasses a method of preventing, diagnosing, treating, or ameliorating a disease or disorder (for example, as indicated in the “Preferred Indications” column of Tables 1D, and 1E) related to one, two, three, or more, of the cells, tissues, and organs where the polynucleotide and/or polypeptide is expressed (for example, as indicated in the “Tissue Distribution” column of Table 1B); comprising administering to a patient in which such prevention, diagnosis, treatment, or amelioration is desired a protein, nucleic acid, or antibody of the invention (or fragment or variant thereof) represented by Tables 1A, and 1B, in an amount effective to prevent, diagnose, treat, or ameliorate the indicated disease or disorder.

[0339] In another embodiment, the present invention also encompasses methods of preventing, diagnosing, treating, or ameliorating a disease or disorder related to one, two, three, or more, of the cells, tissues, and organs where the polynucleotide and/or polypeptide is expressed (for example, as indicated in the “Tissue Distribution” column of Table 1B) or as indicated in the “Preferred Indications” column of Tables 1D, and 1E; comprising administering to a patient diagnostic or therapeutic molecules in combination with proteins, nucleic acids, or antibodies of the invention (or fragments or variants thereof) as represented by Tables 1A, and 1B.

[0340] The tissue distribution and homology indicates that polynucleotides and polypeptides corresponding to this gene are useful for the diagnosis and treatment of neoplasms of the gastrointestinal tract based on the high level of expression of this gene in such tumors.

[0341] Features of Protein Encoded by Gene No: 61

[0342] The translation product of this gene shares sequence homology with neurotensin/neuromedin N which is thought to be important in regulation of fat degradation. It has also been shown to induce contractions of smooth muscle.

[0343] This gene is expressed primarily in uterine carcinomas (NCI_CGAP_Ut4/Ut1) and to a lesser extent in other cancer cells and tissues, such as ovarian tumor (NCI_CGAP_Ov23), NTERA2, control; Tongue carcinoma; Larynx tumor; esophageal cancer; and germ cell tumors (NCI_CGAP_GC4).

[0344] Polynucleotides and polypeptides of the invention are useful as reagents for differential identification of the tissue(s) or cell type(s) present in a biological sample and for diagnosis of diseases and conditions which include but are not limited to cancer, especially of the esophagus, and other digestive epithelium, as well as reproductive tissue, especially uterine cancer. Similarly, polypeptides and antibodies directed to these polypeptides are useful in providing immunological probes for differential identification of the tissue(s) or cell type(s). For a number of disorders of the above tissues or cells, particularly of the digestive epithelium and reproductive systems, expression of this gene at significantly higher or lower levels may be routinely detected in certain tissues or cell types (e.g., cancerous and wounded tissues) or bodily fluids (e.g., serum, plasma, urine, synovial fluid and spinal fluid) or another tissue or sample taken from an individual having such a disorder, relative to the standard gene expression level, i.e., the expression level in healthy tissue or bodily fluid from an individual not having the disorder.

[0345] Embodiments of the invention encompass using polynucleotides and polypeptides (including fragments and variants thereof, and also antibodies, agonists, and antagonists thereof) to prevent, diagnose, treat, or ameliorate a disease or disorder. In preferred embodiments, the present invention encompasses a method of preventing, diagnosing, treating, or ameliorating a disease or disorder (for example, as indicated in the “Preferred Indications” column of Tables 1D, and 1E) related to one, two, three, or more, of the cells, tissues, and organs where the polynucleotide and/or polypeptide is expressed (for example, as indicated in the “Tissue Distribution” column of Table 1B); comprising administering to a patient in which such prevention, diagnosis, treatment, or amelioration is desired a protein, nucleic acid, or antibody of the invention (or fragment or variant thereof) represented by Tables 1A, and 1B, in an amount effective to prevent, diagnose, treat, or ameliorate the indicated disease or disorder.

[0346] In another embodiment, the present invention also encompasses methods of preventing, diagnosing, treating, or ameliorating a disease or disorder related to one, two, three, or more, of the cells, tissues, and organs where the polynucleotide and/or polypeptide is expressed (for example, as indicated in the “Tissue Distribution” column of Table 1B) or as indicated in the “Preferred Indications” column of Tables 1D, and 1E; comprising administering to a patient diagnostic or therapeutic molecules in combination with proteins, nucleic acids, or antibodies of the invention (or fragments or variants thereof) as represented by Tables 1A, and 1B.

[0347] The tissue distribution (especially the presence of this gene's mRNA in esophageal cancer) and homology to neurotensin/neuromedin N indicates that polynucleotides and polypeptides corresponding to this gene are useful for diagnosis and treatment of cancer and other proliferative disorder; particularly of the esophagus and other digestive epithelium, and of the reproductive system, especially uterus and ovaries.

[0348] Features of Protein Encoded by Gene No: 62

[0349] The translation product of this gene shares sequence homology with endosialin, which is thought to be important as tumor/endothelial marker.

[0350] This gene is expressed primarily in chondrosarcoma, and to a lesser extent in highly vascularized or neo-vascularized tissues such as kidney, infant brain, fetal liver and spleen, lung, HUVEC cells, fetal heart and numerous tumors such as lung, kidney, ovarian, prostate and esophageal.

[0351] Polynucleotides and polypeptides of the invention are useful as reagents for differential identification of the tissue(s) or cell type(s) present in a biological sample and for diagnosis of diseases and conditions which include but are not limited to cancer and other neoplasms and diseases involving vascularization. Similarly, polypeptides and antibodies directed to these polypeptides are useful in providing immunological probes for differential identification of the tissue(s) or cell type(s). For a number of disorders of the above tissues or cells, particularly of the gastrointestinal tract and musculoskeletal systems, expression of this gene at significantly higher or lower levels may be routinely detected in certain tissues or cell types (e.g., cancerous and wounded tissues) or bodily fluids (e.g., serum, plasma, urine, synovial fluid and spinal fluid) or another tissue or sample taken from an individual having such a disorder, relative to the standard gene expression level, i.e., the expression level in healthy tissue or bodily fluid from an individual not having the disorder.

[0352] Embodiments of the invention encompass using polynucleotides and polypeptides (including fragments and variants thereof, and also antibodies, agonists, and antagonists thereof) to prevent, diagnose, treat, or ameliorate a disease or disorder. In preferred embodiments, the present invention encompasses a method of preventing, diagnosing, treating, or ameliorating a disease or disorder (for example, as indicated in the “Preferred Indications” column of Tables 1D, and 1E) related to one, two, three, or more, of the cells, tissues, and organs where the polynucleotide and/or polypeptide is expressed (for example, as indicated in the “Tissue Distribution” column of Table 1B); comprising administering to a patient in which such prevention, diagnosis, treatment, or amelioration is desired a protein, nucleic acid, or antibody of the invention (or fragment or variant thereof) represented by Tables 1A, and 1B, in an amount effective to prevent, diagnose, treat, or ameliorate the indicated disease or disorder.

[0353] In another embodiment, the present invention also encompasses methods of preventing, diagnosing, treating, or ameliorating a disease or disorder related to one, two, three, or more, of the cells, tissues, and organs where the polynucleotide and/or polypeptide is expressed (for example, as indicated in the “Tissue Distribution” column of Table 1B) or as indicated in the “Preferred Indications” column of Tables 1D, and 1E; comprising administering to a patient diagnostic or therapeutic molecules in combination with proteins, nucleic acids, or antibodies of the invention (or fragments or variants thereof) as represented by Tables 1A, and 1B.

[0354] The tissue distribution and homology to endosialin indicates that polynucleotides and polypeptides corresponding to this gene are useful for the diagnosis and treatment of tumors since the gene appears to be involved in the regulation of angiogenesis. Thus, inhibition of this molecule by antibodies or small molecules may be useful in the control of tumor growth and metastasis. Additionally, this molecule may also be useful in other indications to promote angiogenesis.

[0355] Features of Protein Encoded by Gene No: 63

[0356] The translation product of this gene shares sequence homology with members of the Ly-6 family of proteins, which are thought to be important in immuno-modulation, especially T cell regulation.

[0357] This gene is expressed primarily in epithelial tissues such as larynx, healing wound, palate (carcinoma) and esophagus (normal and cancer) and to a lesser extent in lung and colon cancer.

[0358] Polynucleotides and polypeptides of the invention are useful as reagents for differential identification of the tissue(s) or cell type(s) present in a biological sample and for diagnosis of diseases and conditions which include but are not limited to cancer and other neoplasms. Similarly, polypeptides and antibodies directed to these polypeptides are useful in providing immunological probes for differential identification of the tissue(s) or cell type(s). For a number of disorders of the above tissues or cells, particularly of the epithelial origin including gastrointestinal tract, larynx, buccal cavity, lung colon and esophagus, expression of this gene at significantly higher or lower levels may be routinely detected in certain tissues or cell types (e.g., cancerous and wounded tissues) or bodily fluids (e.g., serum, plasma, urine, synovial fluid and spinal fluid) or another tissue or sample taken from an individual having such a disorder, relative to the standard gene expression level, i.e., the expression level in healthy tissue or bodily fluid from an individual not having the disorder.

[0359] Embodiments of the invention encompass using polynucleotides and polypeptides (including fragments and variants thereof, and also antibodies, agonists, and antagonists thereof) to prevent, diagnose, treat, or ameliorate a disease or disorder. In preferred embodiments, the present invention encompasses a method of preventing, diagnosing, treating, or ameliorating a disease or disorder (for example, as indicated in the “Preferred Indications” column of Tables 1D, and 1E) related to one, two, three, or more, of the cells, tissues, and organs where the polynucleotide and/or polypeptide is expressed (for example, as indicated in the “Tissue Distribution” column of Table 1B); comprising administering to a patient in which such prevention, diagnosis, treatment, or amelioration is desired a protein, nucleic acid, or antibody of the invention (or fragment or variant thereof) represented by Tables 1A, and 1B, in an amount effective to prevent, diagnose, treat, or ameliorate the indicated disease or disorder.

[0360] In another embodiment, the present invention also encompasses methods of preventing, diagnosing, treating, or ameliorating a disease or disorder related to one, two, three, or more, of the cells, tissues, and organs where the polynucleotide and/or polypeptide is expressed (for example, as indicated in the “Tissue Distribution” column of Table 1B) or as indicated in the “Preferred Indications” column of Tables 1D, and 1E; comprising administering to a patient diagnostic or therapeutic molecules in combination with proteins, nucleic acids, or antibodies of the invention (or fragments or variants thereof) as represented by Tables 1A, and 1B.

[0361] The tissue distribution and homology to the Ly-6 family of proteins indicates that polynucleotides and polypeptides corresponding to this gene are useful for the treatment and diagnosis of cancers of epithelial origin. The homology to the Ly-6 family of proteins suggest that this protein may be involved in either tumor evasion of immune surveillance by the immune system (especially by cytotoxic T cells) which function to monitor and destroy neoplasms. In this instance therapeutic antibodies or other small molecules would be therapeutically beneficial. Conversely the protein may be a normal signal sent by cells to inform the immune of neoplastic growth. The gene therefore may be used directly as an immune stimulant to bolster immune based cytotoxic responses to tumors.

[0362] Features of Protein Encoded by Gene No: 64

[0363] The translation product of this gene shares sequence homology with lumican, which is thought to be important in cell migration and proliferation during development, tissue repair, and tumor growth.

[0364] This gene is expressed primarily in esophageal cancer.

[0365] Polynucleotides and polypeptides of the invention are useful as reagents for differential identification of the tissue(s) or cell type(s) present in a biological sample and for diagnosis of diseases and conditions which include but are not limited to: esophageal cancer. Similarly, polypeptides and antibodies directed to these polypeptides are useful in providing immunological probes for differential identification of the tissue(s) or cell type(s). For a number of disorders of the above tissues or cells, particularly of the digestive system, expression of this gene at significantly higher or lower levels may be routinely detected in certain tissues or cell types (e.g., cancerous and wounded tissues) or bodily fluids (e.g., serum, plasma, urine, synovial fluid and spinal fluid) or another tissue or sample taken from an individual having such a disorder, relative to the standard gene expression level, i.e., the expression level in healthy tissue or bodily fluid from an individual not having the disorder.

[0366] Embodiments of the invention encompass using polynucleotides and polypeptides (including fragments and variants thereof, and also antibodies, agonists, and antagonists thereof) to prevent, diagnose, treat, or ameliorate a disease or disorder. In preferred embodiments, the present invention encompasses a method of preventing, diagnosing, treating, or ameliorating a disease or disorder (for example, as indicated in the “Preferred Indications” column of Tables 1D, and 1E) related to one, two, three, or more, of the cells, tissues, and organs where the polynucleotide and/or polypeptide is expressed (for example, as indicated in the “Tissue Distribution” column of Table 1B); comprising administering to a patient in which such prevention, diagnosis, treatment, or amelioration is desired a protein, nucleic acid, or antibody of the invention (or fragment or variant thereof) represented by Tables 1A, and 1B, in an amount effective to prevent, diagnose, treat, or ameliorate the indicated disease or disorder.

[0367] In another embodiment, the present invention also encompasses methods of preventing, diagnosing, treating, or ameliorating a disease or disorder related to one, two, three, or more, of the cells, tissues, and organs where the polynucleotide and/or polypeptide is expressed (for example, as indicated in the “Tissue Distribution” column of Table 1B) or as indicated in the “Preferred Indications” column of Tables 1D, and 1E; comprising administering to a patient diagnostic or therapeutic molecules in combination with proteins, nucleic acids, or antibodies of the invention (or fragments or variants thereof) as represented by Tables 1A, and 1B.

[0368] The tissue distribution and homology to a family of small leucine rich glycoproteins involved in cell migration and proliferation indicates that polynucleotides and polypeptides corresponding to this gene are useful for the treatment and/or detection of esophageal cancer, esophagitis, gastro-esophageal reflux disease and Barrett esophagus.

[0369] Features of Protein Encoded by Gene No: 65

[0370] The translation product of this gene shares sequence homology with the N-acetylglucosamine-specific receptor of the thyroid, which is thought to be important in binding of proteins containing N-acetylglucosamine residues

[0371] This gene is expressed primarily in normal esophagus.

[0372] Polynucleotides and polypeptides of the invention are useful as reagents for differential identification of the tissue(s) or cell type(s) present in a biological sample and for diagnosis of diseases and conditions which include but are not limited to cancer and other neoplasms. Similarly, polypeptides and antibodies directed to these polypeptides are useful in providing immunological probes for differential identification of the tissue(s) or cell type(s). For a number of disorders of the above tissues or cells, particularly of the gastrointestinal tract, expression of this gene at significantly higher or lower levels may be routinely detected in certain tissues or cell types (e.g., cancerous and wounded tissues) or bodily fluids (e.g., serum, plasma, urine, synovial fluid and spinal fluid) or another tissue or sample taken from an individual having such a disorder, relative to the standard gene expression level, i.e., the expression level in healthy tissue or bodily fluid from an individual not having the disorder.

[0373] Embodiments of the invention encompass using polynucleotides and polypeptides (including fragments and variants thereof, and also antibodies, agonists, and antagonists thereof) to prevent, diagnose, treat, or ameliorate a disease or disorder. In preferred embodiments, the present invention encompasses a method of preventing, diagnosing, treating, or ameliorating a disease or disorder (for example, as indicated in the “Preferred Indications” column of Tables 1D, and 1E) related to one, two, three, or more, of the cells, tissues, and organs where the polynucleotide and/or polypeptide is expressed (for example, as indicated in the “Tissue Distribution” column of Table 1B); comprising administering to a patient in which such prevention, diagnosis, treatment, or amelioration is desired a protein, nucleic acid, or antibody of the invention (or fragment or variant thereof) represented by Tables 1A, and 1B, in an amount effective to prevent, diagnose, treat, or ameliorate the indicated disease or disorder.

[0374] In another embodiment, the present invention also encompasses methods of preventing, diagnosing, treating, or ameliorating a disease or disorder related to one, two, three, or more, of the cells, tissues, and organs where the polynucleotide and/or polypeptide is expressed (for example, as indicated in the “Tissue Distribution” column of Table 1B) or as indicated in the “Preferred Indications” column of Tables 1D, and 1E; comprising administering to a patient diagnostic or therapeutic molecules in combination with proteins, nucleic acids, or antibodies of the invention (or fragments or variants thereof) as represented by Tables 1A, and 1B.

[0375] The tissue distribution and homology to N-acetylglucosamine receptors indicates that polynucleotides and polypeptides corresponding to this gene are useful for the diagnosis and treatment of cancers of the gastrointestinal tract. This gene and encoded polypeptides are expressed in normal esophagus; overexpression or loss of expression of the gene may result in pathology associated with malignant states, such as cellular atypia, and cancer. The gene encodes a protein that has homology to the N-acetylglucosamine (NAG) receptor. The encoded protein may therefore bind to NAG or a sugar moiety similar to NAG, or other proteins containing a high carbohydrate content (mucoproteins). Such protein-protein interactions are important for interactions of cells with the extracellular matrix; alterations of these interactions may result in loss of adhesive properties and higher propensity of cells for metastasis—thus either loss of this protein or overexpression of this protein may affect the malignant potential of cells.

[0376] Features of Protein Encoded by Gene No: 66

[0377] The translation product of this gene shares sequence homology with placental protein 11 precursor, and homologous to glucocorticoid-sensitive T cell-specific protein 30, which is thought to be important in protein processing, and as a T cell marker.

[0378] This gene is expressed primarily in placenta and to a lesser extent in brain, esophagus (malignant) and other cancerous tissues.

[0379] Polynucleotides and polypeptides of the invention are useful as reagents for differential identification of the tissue(s) or cell type(s) present in a biological sample and for diagnosis of diseases and conditions which include but are not limited to: esophageal cancer and other cancers, disorders of the GI tract, immune disorders. Similarly, polypeptides and antibodies directed to these polypeptides are useful in providing immunological probes for differential identification of the tissue(s) or cell type(s). For a number of disorders of the above tissues or cells, particularly of the placenta and immune, GI tract, expression of this gene at significantly higher or lower levels may be routinely detected in certain tissues or cell types (e.g., cancerous and wounded tissues) or bodily fluids (e.g., serum, plasma, urine, synovial fluid and spinal fluid) or another tissue or sample taken from an individual having such a disorder, relative to the standard gene expression level, i.e., the expression level in healthy tissue or bodily fluid from an individual not having the disorder.

[0380] Embodiments of the invention encompass using polynucleotides and polypeptides (including fragments and variants thereof, and also antibodies, agonists, and antagonists thereof) to prevent, diagnose, treat, or ameliorate a disease or disorder. In preferred embodiments, the present invention encompasses a method of preventing, diagnosing, treating, or ameliorating a disease or disorder (for example, as indicated in the “Preferred Indications” column of Tables 1D, and 1E) related to one, two, three, or more, of the cells, tissues, and organs where the polynucleotide and/or polypeptide is expressed (for example, as indicated in the “Tissue Distribution” column of Table 1B); comprising administering to a patient in which such prevention, diagnosis, treatment, or amelioration is desired a protein, nucleic acid, or antibody of the invention (or fragment or variant thereof) represented by Tables 1A, and 1B, in an amount effective to prevent, diagnose, treat, or ameliorate the indicated disease or disorder.

[0381] In another embodiment, the present invention also encompasses methods of preventing, diagnosing, treating, or ameliorating a disease or disorder related to one, two, three, or more, of the cells, tissues, and organs where the polynucleotide and/or polypeptide is expressed (for example, as indicated in the “Tissue Distribution” column of Table 1B) or as indicated in the “Preferred Indications” column of Tables 1D, and 1E; comprising administering to a patient diagnostic or therapeutic molecules in combination with proteins, nucleic acids, or antibodies of the invention (or fragments or variants thereof) as represented by Tables 1A, and 1B.

[0382] Polynucleotides and polypeptides corresponding to this gene are useful for esophageal cancer and other cancers, disorders of the GI tract, and immune disorders.

[0383] Features of Protein Encoded by Gene No: 67

[0384] The translation product of this gene shares sequence homology with membrane dipeptidase, which is thought to be important in renal function.

[0385] This gene is expressed primarily in cancers of the pancreas, uterine and liver cancer and to a lesser extent in other types of cancer and normal tissues.

[0386] Polynucleotides and polypeptides of the invention are useful as reagents for differential identification of the tissue(s) or cell type(s) present in a biological sample and for diagnosis of diseases and conditions which include but are not limited to: pancreas tumors, tumors of the liver and uterine system and renal disorders. Similarly, polypeptides and antibodies directed to these polypeptides are useful in providing immunological probes for differential identification of the tissue(s) or cell type(s). For a number of disorders of the above tissues or cells, particularly of the pancreatic, hepatic and uterine system, expression of this gene at significantly higher or lower levels may be routinely detected in certain tissues or cell types (e.g., cancerous and wounded tissues) or bodily fluids (e.g., serum, plasma, urine, synovial fluid and spinal fluid) or another tissue or sample taken from an individual having such a disorder, relative to the standard gene expression level, i.e., the expression level in healthy tissue or bodily fluid from an individual not having the disorder.

[0387] Embodiments of the invention encompass using polynucleotides and polypeptides (including fragments and variants thereof, and also antibodies, agonists, and antagonists thereof) to prevent, diagnose, treat, or ameliorate a disease or disorder. In preferred embodiments, the present invention encompasses a method of preventing, diagnosing, treating, or ameliorating a disease or disorder (for example, as indicated in the “Preferred Indications” column of Tables 1D, and 1E) related to one, two, three, or more, of the cells, tissues, and organs where the polynucleotide and/or polypeptide is expressed (for example, as indicated in the “Tissue Distribution” column of Table 1B); comprising administering to a patient in which such prevention, diagnosis, treatment, or amelioration is desired a protein, nucleic acid, or antibody of the invention (or fragment or variant thereof) represented by Tables 1A, and 1B, in an amount effective to prevent, diagnose, treat, or ameliorate the indicated disease or disorder.

[0388] In another embodiment, the present invention also encompasses methods of preventing, diagnosing, treating, or ameliorating a disease or disorder related to one, two, three, or more, of the cells, tissues, and organs where the polynucleotide and/or polypeptide is expressed (for example, as indicated in the “Tissue Distribution” column of Table 1B) or as indicated in the “Preferred Indications” column of Tables 1D, and 1E; comprising administering to a patient diagnostic or therapeutic molecules in combination with proteins, nucleic acids, or antibodies of the invention (or fragments or variants thereof) as represented by Tables 1A, and 1B.

[0389] The tissue distribution and homology to membrane dipeptidase indicates that polynucleotides and polypeptides corresponding to this gene are useful for treatment and diagnosis of tumors of the pancreas, tumors of the liver and uterus and other forms of cancer including cancers of the renal system.

[0390] Features of Protein Encoded by Gene No: 68

[0391] The translation product of this gene shares sequence homology with Uteroglobin-related protein 2 precursor, also known as cytokine HIN-1, which is thought to be important in breast cancer tumor suppression. Krop, et al. (PNAS 2001) report that HIN-1/UGR2 expression is significantly reduced in breast tumors compared with normal breast tissue.

[0392] This gene is expressed primarily in esophageal cancer.

[0393] Polynucleotides and polypeptides of the invention are useful as reagents for differential identification of the tissue(s) or cell type(s) present in a biological sample and for diagnosis of diseases and conditions which include but are not limited to esophageal cancer. Similarly, polypeptides and antibodies directed to these polypeptides are useful in providing immunological probes for differential identification of the tissue(s) or cell type(s). For a number of disorders of the above tissues or cells, particularly of the esophagus, expression of this gene at significantly higher or lower levels may be routinely detected in certain tissues or cell types (e.g., cancerous and wounded tissues) or bodily fluids (e.g., serum, plasma, urine, synovial fluid and spinal fluid) or another tissue or sample taken from an individual having such a disorder, relative to the standard gene expression level, i.e., the expression level in healthy tissue or bodily fluid from an individual not having the disorder.

[0394] Embodiments of the invention encompass using polynucleotides and polypeptides (including fragments and variants thereof, and also antibodies, agonists, and antagonists thereof) to prevent, diagnose, treat, or ameliorate a disease or disorder. In preferred embodiments, the present invention encompasses a method of preventing, diagnosing, treating, or ameliorating a disease or disorder (for example, as indicated in the “Preferred Indications” column of Tables 1D, and 1E) related to one, two, three, or more, of the cells, tissues, and organs where the polynucleotide and/or polypeptide is expressed (for example, as indicated in the “Tissue Distribution” column of Table 1B); comprising administering to a patient in which such prevention, diagnosis, treatment, or amelioration is desired a protein, nucleic acid, or antibody of the invention (or fragment or variant thereof) represented by Tables 1A, and 1B, in an amount effective to prevent, diagnose, treat, or ameliorate the indicated disease or disorder.

[0395] In another embodiment, the present invention also encompasses methods of preventing, diagnosing, treating, or ameliorating a disease or disorder related to one, two, three, or more, of the cells, tissues, and organs where the polynucleotide and/or polypeptide is expressed (for example, as indicated in the “Tissue Distribution” column of Table 1B) or as indicated in the “Preferred Indications” column of Tables 1D, and 1E; comprising administering to a patient diagnostic or therapeutic molecules in combination with proteins, nucleic acids, or antibodies of the invention (or fragments or variants thereof) as represented by Tables 1A, and 1B.

[0396] The tissue distribution and homology to the HIN-1 cytokine (known to be differentially expressed at higher levels in normal breast tissue compared to breast cancer tissue) indicates that polynucleotides and polypeptides corresponding to this gene are useful for diagnosis and treatment of esophageal and other cancers.

[0397] Features of Protein Encoded by Gene No: 69

[0398] The translation product of this gene shares sequence homology with porimin, a mucin like transmembrane protein, which is thought to be important in the regulation of cell death. The gene also shares some homology with murine CD164 and other mucin like molecules.

[0399] This gene is expressed primarily in tumors or cell lines derived from tumors such as PC3 a prostate cancer cell line, a Human cell line from hepatocellular carcinoma, Disseminated esophageal adenocarinoma, Hodgkin's Lymphoma, and Stomach Tumor.

[0400] Polynucleotides and polypeptides of the invention are useful as reagents for differential identification of the tissue(s) or cell type(s) present in a biological sample and for diagnosis of diseases and conditions which include but are not limited to cancer and other neoplasms (particularly prostate cancer, esophageal cancer, liver cancer, stomach cancer and Hodgkin's lymphoma). Similarly, polypeptides and antibodies directed to these polypeptides are useful in providing immunological probes for differential identification of the tissue(s) or cell type(s). For a number of disorders of the above tissues or cells, particularly of the prostate, gastrointestinal system, and immune system, expression of this gene at significantly higher or lower levels may be routinely detected in certain tissues or cell types (e.g., cancerous and wounded tissues) or bodily fluids (e.g., serum, plasma, urine, synovial fluid and spinal fluid) or another tissue or sample taken from an individual having such a disorder, relative to the standard gene expression level, i.e., the expression level in healthy tissue or bodily fluid from an individual not having the disorder.

[0401] Embodiments of the invention encompass using polynucleotides and polypeptides (including fragments and variants thereof, and also antibodies, agonists, and antagonists thereof) to prevent, diagnose, treat, or ameliorate a disease or disorder. In preferred embodiments, the present invention encompasses a method of preventing, diagnosing, treating, or ameliorating a disease or disorder (for example, as indicated in the “Preferred Indications” column of Tables 1D, and 1E) related to one, two, three, or more, of the cells, tissues, and organs where the polynucleotide and/or polypeptide is expressed (for example, as indicated in the “Tissue Distribution” column of Table 1B); comprising administering to a patient in which such prevention, diagnosis, treatment, or amelioration is desired a protein, nucleic acid, or antibody of the invention (or fragment or variant thereof) represented by Tables 1A, and 1B, in an amount effective to prevent, diagnose, treat, or ameliorate the indicated disease or disorder.

[0402] In another embodiment, the present invention also encompasses methods of preventing, diagnosing, treating, or ameliorating a disease or disorder related to one, two, three, or more, of the cells, tissues, and organs where the polynucleotide and/or polypeptide is expressed (for example, as indicated in the “Tissue Distribution” column of Table 1B) or as indicated in the “Preferred Indications” column of Tables 1D, and 1E; comprising administering to a patient diagnostic or therapeutic molecules in combination with proteins, nucleic acids, or antibodies of the invention (or fragments or variants thereof) as represented by Tables 1A, and 1B.

[0403] The tissue distribution within neoplasms and cell lines derived from tumors as well as homology to mucin-like transmembrane proteins indicates that polynucleotides and polypeptides corresponding to this gene are useful for the treatment and diagnosis of tumors/cancers of various origins. This gene may be preferentially expressed on tumors, the mucin-like extracellular domain may change the interactions of the expressing cells with extracellular matrix components and result in an altered adhesion properties resulting in a higher propensity to metastasis. Since the protein is transmembrane spanning it may make an attractive target for antibody based immunotherapies.

[0404] Features of Protein Encoded by Gene No: 70

[0405] The translation product of this gene shares sequence homology with Extracellular superoxide dismutase [Cu—Zn] precursor.

[0406] This gene is expressed primarily in adipose tissue and to a lesser extent in many other tissues including esophageal cancer.

[0407] Polynucleotides and polypeptides of the invention are useful as reagents for differential identification of the tissue(s) or cell type(s) present in a biological sample and for diagnosis of diseases and conditions which include but are not limited to: cancers of the esophagus and endocrine disorders (e.g., diabetes). Similarly, polypeptides and antibodies directed to these polypeptides are useful in providing immunological probes for differential identification of the tissue(s) or cell type(s). For a number of disorders of the above tissues or cells, particularly of the gastointestinal system, expression of this gene at significantly higher or lower levels may be routinely detected in certain tissues or cell types (e.g., cancerous and wounded tissues) or bodily fluids (e.g., serum, plasma, urine, synovial fluid and spinal fluid) or another tissue or sample taken from an individual having such a disorder, relative to the standard gene expression level, i.e., the expression level in healthy tissue or bodily fluid from an individual not having the disorder.

[0408] Embodiments of the invention encompass using polynucleotides and polypeptides (including fragments and variants thereof, and also antibodies, agonists, and antagonists thereof) to prevent, diagnose, treat, or ameliorate a disease or disorder. In preferred embodiments, the present invention encompasses a method of preventing, diagnosing, treating, or ameliorating a disease or disorder (for example, as indicated in the “Preferred Indications” column of Tables 1D, and 1E) related to one, two, three, or more, of the cells, tissues, and organs where the polynucleotide and/or polypeptide is expressed (for example, as indicated in the “Tissue Distribution” column of Table 1B); comprising administering to a patient in which such prevention, diagnosis, treatment, or amelioration is desired a protein, nucleic acid, or antibody of the invention (or fragment or variant thereof) represented by Tables 1A, and 1B, in an amount effective to prevent, diagnose, treat, or ameliorate the indicated disease or disorder.

[0409] In another embodiment, the present invention also encompasses methods of preventing, diagnosing, treating, or ameliorating a disease or disorder related to one, two, three, or more, of the cells, tissues, and organs where the polynucleotide and/or polypeptide is expressed (for example, as indicated in the “Tissue Distribution” column of Table 1B) or as indicated in the “Preferred Indications” column of Tables 1D, and 1E; comprising administering to a patient diagnostic or therapeutic molecules in combination with proteins, nucleic acids, or antibodies of the invention (or fragments or variants thereof) as represented by Tables 1A, and 1B.

[0410] The tissue distribution and homology to superoxide dismutase indicates that polynucleotides and polypeptides corresponding to this gene are useful for diagnosis and treatment of a variety of conditions related to oxidant injury (e.g., cancer, autoimmune disease).

[0411] Features of Protein Encoded by Gene No: 71

[0412] This gene is expressed primarily in esophageal cancer.

[0413] Polynucleotides and polypeptides of the invention are useful as reagents for differential identification of the tissue(s) or cell type(s) present in a biological sample and for diagnosis of diseases and conditions which include but are not limited to esophageal cancer. Similarly, polypeptides and antibodies directed to these polypeptides are useful in providing immunological probes for differential identification of the tissue(s) or cell type(s). For a number of disorders of the above tissues or cells, particularly of the digestive tract, expression of this gene at significantly higher or lower levels may be routinely detected in certain tissues or cell types (e.g., cancerous and wounded tissues) or bodily fluids (e.g., serum, plasma, urine, synovial fluid and spinal fluid) or another tissue or sample taken from an individual having such a disorder, relative to the standard gene expression level, i.e., the expression level in healthy tissue or bodily fluid from an individual not having the disorder.

[0414] Embodiments of the invention encompass using polynucleotides and polypeptides (including fragments and variants thereof, and also antibodies, agonists, and antagonists thereof) to prevent, diagnose, treat, or ameliorate a disease or disorder. In preferred embodiments, the present invention encompasses a method of preventing, diagnosing, treating, or ameliorating a disease or disorder (for example, as indicated in the “Preferred Indications” column of Tables 1D, and 1E) related to one, two, three, or more, of the cells, tissues, and organs where the polynucleotide and/or polypeptide is expressed (for example, as indicated in the “Tissue Distribution” column of Table 1B); comprising administering to a patient in which such prevention, diagnosis, treatment, or amelioration is desired a protein, nucleic acid, or antibody of the invention (or fragment or variant thereof) represented by Tables 1A, and 1B, in an amount effective to prevent, diagnose, treat, or ameliorate the indicated disease or disorder.

[0415] In another embodiment, the present invention also encompasses methods of preventing, diagnosing, treating, or ameliorating a disease or disorder related to one, two, three, or more, of the cells, tissues, and organs where the polynucleotide and/or polypeptide is expressed (for example, as indicated in the “Tissue Distribution” column of Table 1B) or as indicated in the “Preferred Indications” column of Tables 1D, and 1E; comprising administering to a patient diagnostic or therapeutic molecules in combination with proteins, nucleic acids, or antibodies of the invention (or fragments or variants thereof) as represented by Tables 1A, and 1B.

[0416] The tissue distribution indicates that polynucleotides and polypeptides corresponding to this gene are useful for the treatment and/or detection of esophageal cancer, esophagitis, gastroesophageal reflux disease and Barrett esophagus.

[0417] Features of Protein Encoded by Gene No: 72

[0418] The translation product of this gene shares sequence homology with pHL E1F1, human lacrimal gland mRNA encodes a new proline-rich protein family member.

[0419] This gene is expressed primarily in esophageal cancer, ductal carcinoma and to a lesser extent in colon cancer.

[0420] Polynucleotides and polypeptides of the invention are useful as reagents for differential identification of the tissue(s) or cell type(s) present in a biological sample and for diagnosis of diseases and conditions which include but are not limited to: Barrett's esophagus, esophageal; cancer, GERD, and colon cancer. Similarly, polypeptides and antibodies directed to these polypeptides are useful in providing immunological probes for differential identification of the tissue(s) or cell type(s). For a number of disorders of the above tissues or cells, particularly of the gastrointestinal tract expression of this gene at significantly higher or lower levels may be routinely detected in certain tissues or cell types (e.g., cancerous and wounded tissues) or bodily fluids (e.g., serum, plasma, urine, synovial fluid and spinal fluid) or another tissue or sample taken from an individual having such a disorder, relative to the standard gene expression level, i.e., the expression level in healthy tissue or bodily fluid from an individual not having the disorder.

[0421] Embodiments of the invention encompass using polynucleotides and polypeptides (including fragments and variants thereof, and also antibodies, agonists, and antagonists thereof) to prevent, diagnose, treat, or ameliorate a disease or disorder. In preferred embodiments, the present invention encompasses a method of preventing, diagnosing, treating, or ameliorating a disease or disorder (for example, as indicated in the “Preferred Indications” column of Tables 1D, and 1E) related to one, two, three, or more, of the cells, tissues, and organs where the polynucleotide and/or polypeptide is expressed (for example, as indicated in the “Tissue Distribution” column of Table 1B); comprising administering to a patient in which such prevention, diagnosis, treatment, or amelioration is desired a protein, nucleic acid, or antibody of the invention (or fragment or variant thereof) represented by Tables 1A, and 1B, in an amount effective to prevent, diagnose, treat, or ameliorate the indicated disease or disorder.

[0422] In another embodiment, the present invention also encompasses methods of preventing, diagnosing, treating, or ameliorating a disease or disorder related to one, two, three, or more, of the cells, tissues, and organs where the polynucleotide and/or polypeptide is expressed (for example, as indicated in the “Tissue Distribution” column of Table 1B) or as indicated in the “Preferred Indications” column of Tables 1D, and 1E; comprising administering to a patient diagnostic or therapeutic molecules in combination with proteins, nucleic acids, or antibodies of the invention (or fragments or variants thereof) as represented by Tables 1A, and 1B.

[0423] Polynucleotides and polypeptides corresponding to this gene are useful for the diagnosis and/or treatment of GERD, Barrett's esophagus, esophageal cancer, and/or colon cancer.

[0424] Features of Protein Encoded by Gene No: 73

[0425] This gene is expressed primarily in malignant esophagus.

[0426] Polynucleotides and polypeptides of the invention are useful as reagents for differential identification of the tissue(s) or cell type(s) present in a biological sample and for diagnosis of diseases and conditions which include but are not limited to: esophageal cancer. Similarly, polypeptides and antibodies directed to these polypeptides are useful in providing immunological probes for differential identification of the tissue(s) or cell type(s). For a number of disorders of the above tissues or cells, particularly of the digestive tract, expression of this gene at significantly higher or lower levels may be routinely detected in certain tissues or cell types (e.g., cancerous and wounded tissues) or bodily fluids (e.g., serum, plasma, urine, synovial fluid and spinal fluid) or another tissue or sample taken from an individual having such a disorder, relative to the standard gene expression level, i.e., the expression level in healthy tissue or bodily fluid from an individual not having the disorder.

[0427] Embodiments of the invention encompass using polynucleotides and polypeptides (including fragments and variants thereof, and also antibodies, agonists, and antagonists thereof) to prevent, diagnose, treat, or ameliorate a disease or disorder. In preferred embodiments, the present invention encompasses a method of preventing, diagnosing, treating, or ameliorating a disease or disorder (for example, as indicated in the “Preferred Indications” column of Tables 1D, and 1E) related to one, two, three, or more, of the cells, tissues, and organs where the polynucleotide and/or polypeptide is expressed (for example, as indicated in the “Tissue Distribution” column of Table 1B); comprising administering to a patient in which such prevention, diagnosis, treatment, or amelioration is desired a protein, nucleic acid, or antibody of the invention (or fragment or variant thereof) represented by Tables 1A, and 1B, in an amount effective to prevent, diagnose, treat, or ameliorate the indicated disease or disorder.

[0428] In another embodiment, the present invention also encompasses methods of preventing, diagnosing, treating, or ameliorating a disease or disorder related to one, two, three, or more, of the cells, tissues, and organs where the polynucleotide and/or polypeptide is expressed (for example, as indicated in the “Tissue Distribution” column of Table 1B) or as indicated in the “Preferred Indications” column of Tables 1D, and 1E; comprising administering to a patient diagnostic or therapeutic molecules in combination with proteins, nucleic acids, or antibodies of the invention (or fragments or variants thereof) as represented by Tables 1A, and 1B.

[0429] The tissue distribution and homology indicates that polynucleotides and polypeptides corresponding to this gene are useful for the treatment and/or detection of esophageal cancer, esophagitis, gastroesophageal reflux disease and Barrett's esophagus.

[0430] Features of Protein Encoded by Gene No: 74

[0431] The translation product of this gene shares sequence homology with intestinal mucins which are thought to be important in epithelial protection and lubrication.

[0432] This gene is expressed primarily in keratinocytes and to a lesser extent in other epithelial tissues such as esophageal (cancer), tongue, skin as well thymus stromal cells and breast cancer cell line MDA-36.

[0433] Polynucleotides and polypeptides of the invention are useful as reagents for differential identification of the tissue(s) or cell type(s) present in a biological sample and for diagnosis of diseases and conditions which include but are not limited to cancer and epithelial erosion diseases such as Barrett's esophagus. Similarly, polypeptides and antibodies directed to these polypeptides are useful in providing immunological probes for differential identification of the tissue(s) or cell type(s). For a number of disorders of the above tissues or cells, particularly of tissues lined by epithelial cells such as in the gastrointestinal tract or skin, expression of this gene at significantly higher or lower levels may be routinely detected in certain tissues or cell types (e.g., cancerous and wounded tissues) or bodily fluids (e.g., serum, plasma, urine, synovial fluid and spinal fluid) or another tissue or sample taken from an individual having such a disorder, relative to the standard gene expression level, i.e., the expression level in healthy tissue or bodily fluid from an individual not having the disorder.

[0434] Embodiments of the invention encompass using polynucleotides and polypeptides (including fragments and variants thereof, and also antibodies, agonists, and antagonists thereof) to prevent, diagnose, treat, or ameliorate a disease or disorder. In preferred embodiments, the present invention encompasses a method of preventing, diagnosing, treating, or ameliorating a disease or disorder (for example, as indicated in the “Preferred Indications” column of Tables 1D, and 1E) related to one, two, three, or more, of the cells, tissues, and organs where the polynucleotide and/or polypeptide is expressed (for example, as indicated in the “Tissue Distribution” column of Table 1B); comprising administering to a patient in which such prevention, diagnosis, treatment, or amelioration is desired a protein, nucleic acid, or antibody of the invention (or fragment or variant thereof) represented by Tables 1A, and 1B, in an amount effective to prevent, diagnose, treat, or ameliorate the indicated disease or disorder.

[0435] In another embodiment, the present invention also encompasses methods of preventing, diagnosing, treating, or ameliorating a disease or disorder related to one, two, three, or more, of the cells, tissues, and organs where the polynucleotide and/or polypeptide is expressed (for example, as indicated in the “Tissue Distribution” column of Table 1B) or as indicated in the “Preferred Indications” column of Tables 1D, and 1E; comprising administering to a patient diagnostic or therapeutic molecules in combination with proteins, nucleic acids, or antibodies of the invention (or fragments or variants thereof) as represented by Tables 1A, and 1B.

[0436] The tissue distribution and homology to mucins indicates that polynucleotides and polypeptides corresponding to this gene are useful for the diagnosis and treatment of cancers and neoplasms of epithelial origin including gastrointestinal and skin malignancies. Expression or overexpression of the gene and encoded polypeptides may promote tumorigenesis or help the cancerous cells avoid immune surveillance. Antibodies or small molecules directed against the protein, or designed to inhibit the biological activity of the protein may therefore prove therapeutically useful. Additionally antibodies may provide a means to mount an immune based cytotoxic attack on the neoplastic cells. Alternately, the mucin-like molecule may have a protective role, especially in epithelial tissues which are subject to harsh conditions (i.e., abrasion of the skin or protection of the esophagus from stomach acid)

[0437] Features of Protein Encoded by Gene No: 75

[0438] This gene is expressed primarily in esophageal cancer.

[0439] Polynucleotides and polypeptides of the invention are useful as reagents for differential identification of the tissue(s) or cell type(s) present in a biological sample and for diagnosis of diseases and conditions which include but are not limited to: esophageal cancer. Similarly, polypeptides and antibodies directed to these polypeptides are useful in providing immunological probes for differential identification of the tissue(s) or cell type(s). For a number of disorders of the above tissues or cells, particularly of the digestive tract, expression of this gene at significantly higher or lower levels may be routinely detected in certain tissues or cell types (e.g., cancerous and wounded tissues) or bodily fluids (e.g., serum, plasma, urine, synovial fluid and spinal fluid) or another tissue or sample taken from an individual having such a disorder, relative to the standard gene expression level, i.e., the expression level in healthy tissue or bodily fluid from an individual not having the disorder.

[0440] Embodiments of the invention encompass using polynucleotides and polypeptides (including fragments and variants thereof, and also antibodies, agonists, and antagonists thereof) to prevent, diagnose, treat, or ameliorate a disease or disorder. In preferred embodiments, the present invention encompasses a method of preventing, diagnosing, treating, or ameliorating a disease or disorder (for example, as indicated in the “Preferred Indications” column of Tables 1D, and 1E) related to one, two, three, or more, of the cells, tissues, and organs where the polynucleotide and/or polypeptide is expressed (for example, as indicated in the “Tissue Distribution” column of Table 1B); comprising administering to a patient in which such prevention, diagnosis, treatment, or amelioration is desired a protein, nucleic acid, or antibody of the invention (or fragment or variant thereof) represented by Tables 1A, and 1B, in an amount effective to prevent, diagnose, treat, or ameliorate the indicated disease or disorder.

[0441] In another embodiment, the present invention also encompasses methods of preventing, diagnosing, treating, or ameliorating a disease or disorder related to one, two, three, or more, of the cells, tissues, and organs where the polynucleotide and/or polypeptide is expressed (for example, as indicated in the “Tissue Distribution” column of Table 1B) or as indicated in the “Preferred Indications” column of Tables 1D, and 1E; comprising administering to a patient diagnostic or therapeutic molecules in combination with proteins, nucleic acids, or antibodies of the invention (or fragments or variants thereof) as represented by Tables 1A, and 1B.

[0442] The tissue distribution indicates that polynucleotides and polypeptides corresponding to this gene are useful for the treatment and/or detection of esophageal cancer, esophagitis, gastroesophageal reflux disease and Barrett esophagus.

[0443] Features of Protein Encoded by Gene No: 76

[0444] This gene is expressed primarily in esophagus.

[0445] Polynucleotides and polypeptides of the invention are useful as reagents for differential identification of the tissue(s) or cell type(s) present in a biological sample and for diagnosis of diseases and conditions which include but are not limited to cancer (particularly esophageal cancer), acid reflux disease and Barrett's esophagus. Similarly, polypeptides and antibodies directed to these polypeptides are useful in providing immunological probes for differential identification of the tissue(s) or cell type(s). For a number of disorders of the above tissues or cells, particularly of gastrointestinal system, expression of this gene at significantly higher or lower levels may be routinely detected in certain tissues or cell types (e.g., cancerous and wounded tissues) or bodily fluids (e.g., serum, plasma, urine, synovial fluid and spinal fluid) or another tissue or sample taken from an individual having such a disorder, relative to the standard gene expression level, i.e., the expression level in healthy tissue or bodily fluid from an individual not having the disorder.

[0446] Embodiments of the invention encompass using polynucleotides and polypeptides (including fragments and variants thereof, and also antibodies, agonists, and antagonists thereof) to prevent, diagnose, treat, or ameliorate a disease or disorder. In preferred embodiments, the present invention encompasses a method of preventing, diagnosing, treating, or ameliorating a disease or disorder (for example, as indicated in the “Preferred Indications” column of Tables 1D, and 1E) related to one, two, three, or more, of the cells, tissues, and organs where the polynucleotide and/or polypeptide is expressed (for example, as indicated in the “Tissue Distribution” column of Table 1B); comprising administering to a patient in which such prevention, diagnosis, treatment, or amelioration is desired a protein, nucleic acid, or antibody of the invention (or fragment or variant thereof) represented by Tables 1A, and 1B, in an amount effective to prevent, diagnose, treat, or ameliorate the indicated disease or disorder.

[0447] In another embodiment, the present invention also encompasses methods of preventing, diagnosing, treating, or ameliorating a disease or disorder related to one, two, three, or more, of the cells, tissues, and organs where the polynucleotide and/or polypeptide is expressed (for example, as indicated in the “Tissue Distribution” column of Table 1B) or as indicated in the “Preferred Indications” column of Tables 1D, and 1E; comprising administering to a patient diagnostic or therapeutic molecules in combination with proteins, nucleic acids, or antibodies of the invention (or fragments or variants thereof) as represented by Tables 1A, and 1B.

[0448] The esophageal tissue distribution indicates that polynucleotides and polypeptides corresponding to this gene are useful for the diagnosis and treatment of disorders of the esophagus and other regions of the gastrointestinal system, particularly esophageal cancer, where the protein may act to stimulate or inhibit proliferation of esophageal mucosal cells. Stimulation of the proliferation of the mucosal cells may also prove useful in acid reflux disease where constant exposure of cells to the acidic contents causes pathology; repair of the mucosal lining could be induced by such a factor.

[0449] Features of Protein Encoded by Gene No: 77

[0450] The translation product of this gene shares sequence homology with bone marrow stromal cell surface gene, BST2, which is thought to be involved in pre-B-cell growth.

[0451] This gene is expressed primarily in ovary and reproductive system tissues, immune tissues and to a lesser extent in GI tract and several other tissues.

[0452] Polynucleotides and polypeptides of the invention are useful as reagents for differential identification of the tissue(s) or cell type(s) present in a biological sample and for diagnosis of diseases and conditions which include but are not limited to: ovarian cancer and other malignancies, immune disorders (e.g., B-cell lymphoma), disorders of the GI tract. Similarly, polypeptides and antibodies directed to these polypeptides are useful in providing immunological probes for differential identification of the tissue(s) or cell type(s). For a number of disorders of the above tissues or cells, particularly of the reproductive system, immune system, digestive and excretory system, expression of this gene at significantly higher or lower levels may be routinely detected in certain tissues or cell types (e.g., cancerous and wounded tissues) or bodily fluids (e.g., serum, plasma, urine, synovial fluid and spinal fluid) or another tissue or sample taken from an individual having such a disorder, relative to the standard gene expression level, i.e., the expression level in healthy tissue or bodily fluid from an individual not having the disorder.

[0453] Embodiments of the invention encompass using polynucleotides and polypeptides (including fragments and variants thereof, and also antibodies, agonists, and antagonists thereof) to prevent, diagnose, treat, or ameliorate a disease or disorder. In preferred embodiments, the present invention encompasses a method of preventing, diagnosing, treating, or ameliorating a disease or disorder (for example, as indicated in the “Preferred Indications” column of Tables 1D, and 1E) related to one, two, three, or more, of the cells, tissues, and organs where the polynucleotide and/or polypeptide is expressed (for example, as indicated in the “Tissue Distribution” column of Table 1B); comprising administering to a patient in which such prevention, diagnosis, treatment, or amelioration is desired a protein, nucleic acid, or antibody of the invention (or fragment or variant thereof) represented by Tables 1A, and 1B, in an amount effective to prevent, diagnose, treat, or ameliorate the indicated disease or disorder.

[0454] In another embodiment, the present invention also encompasses methods of preventing, diagnosing, treating, or ameliorating a disease or disorder related to one, two, three, or more, of the cells, tissues, and organs where the polynucleotide and/or polypeptide is expressed (for example, as indicated in the “Tissue Distribution” column of Table 1B) or as indicated in the “Preferred Indications” column of Tables 1D, and 1E; comprising administering to a patient diagnostic or therapeutic molecules in combination with proteins, nucleic acids, or antibodies of the invention (or fragments or variants thereof) as represented by Tables 1A, and 1B.

[0455] The tissue distribution and homology to BST2 indicates that polynucleotides and polypeptides corresponding to this gene are useful for diagnosis and/or treatment of disorders of the reproductive system, including ovarian cancer, immune disorders (e.g., B and T-cell lymphomas, and/or disorders of the GI tract.

[0456] Features of Protein Encoded by Gene No: 78

[0457] The translation product of this gene shares sequence homology with tetracycline transporter protein which is a member of the multispanning transmembrane proteins thought to transport drugs and confer multidrug resistance.

[0458] This gene is expressed primarily in normal prostate and to a lesser extent in many tumors including breast cancer, testicular cancer, pancreatic cancer, lymphoma, uterine cancer and stomach tumor as well as immune/hematopoietic cells including neutrophils, HL60 cells, B cells, dendritic cells and T cells.

[0459] Polynucleotides and polypeptides of the invention are useful as reagents for differential identification of the tissue(s) or cell type(s) present in a biological sample and for diagnosis of diseases and conditions which include but are not limited to cancer and other neoplasms. Similarly, polypeptides and antibodies directed to these polypeptides are useful in providing immunological probes for differential identification of the tissue(s) or cell type(s). For a number of disorders of the above tissues or cells, particularly of the gastrointestinal tract, breast and urogenital systems, expression of this gene at significantly higher or lower levels may be routinely detected in certain tissues or cell types (e.g., cancerous and wounded tissues) or bodily fluids (e.g., serum, plasma, urine, synovial fluid and spinal fluid) or another tissue or sample taken from an individual having such a disorder, relative to the standard gene expression level, i.e., the expression level in healthy tissue or bodily fluid from an individual not having the disorder.

[0460] Embodiments of the invention encompass using polynucleotides and polypeptides (including fragments and variants thereof, and also antibodies, agonists, and antagonists thereof) to prevent, diagnose, treat, or ameliorate a disease or disorder. In preferred embodiments, the present invention encompasses a method of preventing, diagnosing, treating, or ameliorating a disease or disorder (for example, as indicated in the “Preferred Indications” column of Tables 1D, and 1E) related to one, two, three, or more, of the cells, tissues, and organs where the polynucleotide and/or polypeptide is expressed (for example, as indicated in the “Tissue Distribution” column of Table 1B); comprising administering to a patient in which such prevention, diagnosis, treatment, or amelioration is desired a protein, nucleic acid, or antibody of the invention (or fragment or variant thereof) represented by Tables 1A, and 1B, in an amount effective to prevent, diagnose, treat, or ameliorate the indicated disease or disorder.

[0461] In another embodiment, the present invention also encompasses methods of preventing, diagnosing, treating, or ameliorating a disease or disorder related to one, two, three, or more, of the cells, tissues, and organs where the polynucleotide and/or polypeptide is expressed (for example, as indicated in the “Tissue Distribution” column of Table 1B) or as indicated in the “Preferred Indications” column of Tables 1D, and 1E; comprising administering to a patient diagnostic or therapeutic molecules in combination with proteins, nucleic acids, or antibodies of the invention (or fragments or variants thereof) as represented by Tables 1A, and 1B.

[0462] The tissue distribution and homology to multispanning transmembrane transporter proteins indicates that polynucleotides and polypeptides corresponding to this gene are useful for the diagnosis and therapeutic intervention of neoplasms of many tissues including those of the gastrointestinal tract, breast, and prostate. This gene encodes polypeptides that may be involved in enabling tumor cells to evade killing by standard small molecule chemotherapies by virtue of its ability to transport the molecules out of the cells. Small molecules and antibodies which target and inhibit the activities of this protein may provide useful therapeutics.

[0463] Features of Protein Encoded by Gene No: 79

[0464] This gene is expressed primarily in placenta and infant brain and to a lesser extent in Ewings sarcoma, osteoclastoma, ovarian cancer, colon cancer, esophageal cancer, uterine cancer, kidney cancer, prostate cancer, brain, and cells of the immune system including T helper cells, promyelocytes, germinal center B cells and spleen.

[0465] Polynucleotides and polypeptides of the invention are useful as reagents for differential identification of the tissue(s) or cell type(s) present in a biological sample and for diagnosis of diseases and conditions which include but are not limited to cancer and other neoplasms. Similarly, polypeptides and antibodies directed to these polypeptides are useful in providing immunological probes for differential identification of the tissue(s) or cell type(s). For a number of disorders of the above tissues or cells, particularly of tumors of the gastrointestinal tract and musculoskeletal system, expression of this gene at significantly higher or lower levels may be routinely detected in certain tissues or cell types (e.g., cancerous and wounded tissues) or bodily fluids (e.g., serum, plasma, urine, synovial fluid and spinal fluid) or another tissue or sample taken from an individual having such a disorder, relative to the standard gene expression level, i.e., the expression level in healthy tissue or bodily fluid from an individual not having the disorder.

[0466] Embodiments of the invention encompass using polynucleotides and polypeptides (including fragments and variants thereof, and also antibodies, agonists, and antagonists thereof) to prevent, diagnose, treat, or ameliorate a disease or disorder. In preferred embodiments, the present invention encompasses a method of preventing, diagnosing, treating, or ameliorating a disease or disorder (for example, as indicated in the “Preferred Indications” column of Tables 1D, and 1E) related to one, two, three, or more, of the cells, tissues, and organs where the polynucleotide and/or polypeptide is expressed (for example, as indicated in the “Tissue Distribution” column of Table 1B); comprising administering to a patient in which such prevention, diagnosis, treatment, or amelioration is desired a protein, nucleic acid, or antibody of the invention (or fragment or variant thereof) represented by Tables 1A, and 1B, in an amount effective to prevent, diagnose, treat, or ameliorate the indicated disease or disorder.

[0467] In another embodiment, the present invention also encompasses methods of preventing, diagnosing, treating, or ameliorating a disease or disorder related to one, two, three, or more, of the cells, tissues, and organs where the polynucleotide and/or polypeptide is expressed (for example, as indicated in the “Tissue Distribution” column of Table 1B) or as indicated in the “Preferred Indications” column of Tables 1D, and 1E; comprising administering to a patient diagnostic or therapeutic molecules in combination with proteins, nucleic acids, or antibodies of the invention (or fragments or variants thereof) as represented by Tables 1A, and 1B.

[0468] The tissue distribution indicates that polynucleotides and polypeptides corresponding to this gene are useful for the diagnosis and treatment of cancers and neoplasms. The expression of the gene preferentially in numerous tumors suggests that the gene and its proteins may be useful for targeting antibodies or other molecules to the tumor cell, or to inhibit the action of the encoded polypeptide which may be tumor promoting.

[0469] Features of Protein Encoded by Gene No: 80

[0470] This gene is expressed primarily in immune tissues, pancreas and to a lesser extent in esophageal cancer and other tissues.

[0471] Polynucleotides and polypeptides of the invention are useful as reagents for differential identification of the tissue(s) or cell type(s) present in a biological sample and for diagnosis of diseases and conditions which include but are not limited to: immune disorders, diabetes, cancer of the gastrointestinal tract, and GERD. Similarly, polypeptides and antibodies directed to these polypeptides are useful in providing immunological probes for differential identification of the tissue(s) or cell type(s). For a number of disorders of the above tissues or cells, particularly of the immune, digestive and gastrointestinal systems, expression of this gene at significantly higher or lower levels may be routinely detected in certain tissues or cell types (e.g., cancerous and wounded tissues) or bodily fluids (e.g., serum, plasma, urine, synovial fluid and spinal fluid) or another tissue or sample taken from an individual having such a disorder, relative to the standard gene expression level, i.e., the expression level in healthy tissue or bodily fluid from an individual not having the disorder.

[0472] Embodiments of the invention encompass using polynucleotides and polypeptides (including fragments and variants thereof, and also antibodies, agonists, and antagonists thereof) to prevent, diagnose, treat, or ameliorate a disease or disorder. In preferred embodiments, the present invention encompasses a method of preventing, diagnosing, treating, or ameliorating a disease or disorder (for example, as indicated in the “Preferred Indications” column of Tables 1D, and 1E) related to one, two, three, or more, of the cells, tissues, and organs where the polynucleotide and/or polypeptide is expressed (for example, as indicated in the “Tissue Distribution” column of Table 1B); comprising administering to a patient in which such prevention, diagnosis, treatment, or amelioration is desired a protein, nucleic acid, or antibody of the invention (or fragment or variant thereof) represented by Tables 1A, and 1B, in an amount effective to prevent, diagnose, treat, or ameliorate the indicated disease or disorder.

[0473] In another embodiment, the present invention also encompasses methods of preventing, diagnosing, treating, or ameliorating a disease or disorder related to one, two, three, or more, of the cells, tissues, and organs where the polynucleotide and/or polypeptide is expressed (for example, as indicated in the “Tissue Distribution” column of Table 1B) or as indicated in the “Preferred Indications” column of Tables 1D, and 1E; comprising administering to a patient diagnostic or therapeutic molecules in combination with proteins, nucleic acids, or antibodies of the invention (or fragments or variants thereof) as represented by Tables 1A, and 1B.

[0474] Polynucleotides and polypeptides corresponding to this gene are useful for diagnosis and/or treatment of immune disorders diabetes, esophageal cancer, and/or GERD.

[0475] Features of Protein Encoded by Gene No: 81

[0476] This gene is expressed primarily in esophageal cancer.

[0477] Polynucleotides and polypeptides of the invention are useful as reagents for differential identification of the tissue(s) or cell type(s) present in a biological sample and for diagnosis of diseases and conditions which include but are not limited to: esophageal cancer, GERD, esophagitis, Crohn's disease, disorders of the GI tract. Similarly, polypeptides and antibodies directed to these polypeptides are useful in providing immunological probes for differential identification of the tissue(s) or cell type(s). For a number of disorders of the above tissues or cells, particularly of the GI tract (e.g., esophagus), expression of this gene at significantly higher or lower levels may be routinely detected in certain tissues or cell types (e.g., cancerous and wounded tissues) or bodily fluids (e.g., serum, plasma, urine, synovial fluid and spinal fluid) or another tissue or sample taken from an individual having such a disorder, relative to the standard gene expression level, i.e., the expression level in healthy tissue or bodily fluid from an individual not having the disorder.

[0478] Embodiments of the invention encompass using polynucleotides and polypeptides (including fragments and variants thereof, and also antibodies, agonists, and antagonists thereof) to prevent, diagnose, treat, or ameliorate a disease or disorder. In preferred embodiments, the present invention encompasses a method of preventing, diagnosing, treating, or ameliorating a disease or disorder (for example, as indicated in the “Preferred Indications” column of Tables 1D, and 1E) related to one, two, three, or more, of the cells, tissues, and organs where the polynucleotide and/or polypeptide is expressed (for example, as indicated in the “Tissue Distribution” column of Table 1B); comprising administering to a patient in which such prevention, diagnosis, treatment, or amelioration is desired a protein, nucleic acid, or antibody of the invention (or fragment or variant thereof) represented by Tables 1A, and 1B, in an amount effective to prevent, diagnose, treat, or ameliorate the indicated disease or disorder.

[0479] In another embodiment, the present invention also encompasses methods of preventing, diagnosing, treating, or ameliorating a disease or disorder related to one, two, three, or more, of the cells, tissues, and organs where the polynucleotide and/or polypeptide is expressed (for example, as indicated in the “Tissue Distribution” column of Table 1B) or as indicated in the “Preferred Indications” column of Tables 1D, and 1E; comprising administering to a patient diagnostic or therapeutic molecules in combination with proteins, nucleic acids, or antibodies of the invention (or fragments or variants thereof) as represented by Tables 1A, and 1B.

[0480] Polynucleotides and polypeptides corresponding to this gene are useful for diagnosis and/or treatment of esophageal cancer, GERD, esophagitis, Crohn's disease, disorders of the GI tract.

[0481] Features of Protein Encoded by Gene No: 82

[0482] This gene is expressed primarily in esophagus and keratinocytes.

[0483] Polynucleotides and polypeptides of the invention are useful as reagents for differential identification of the tissue(s) or cell type(s) present in a biological sample and for diagnosis of diseases and conditions which include but are not limited to: GI tract disorders including esophagitis, GERD, esophageal cancer, ulcers. Similarly, polypeptides and antibodies directed to these polypeptides are useful in providing immunological probes for differential identification of the tissue(s) or cell type(s). For a number of disorders of the above tissues or cells, particularly of the Gastrointestinal tract, expression of this gene at significantly higher or lower levels may be routinely detected in certain tissues or cell types (e.g., cancerous and wounded tissues) or bodily fluids (e.g., serum, plasma, urine, synovial fluid and spinal fluid) or another tissue or sample taken from an individual having such a disorder, relative to the standard gene expression level, i.e., the expression level in healthy tissue or bodily fluid from an individual not having the disorder.

[0484] Embodiments of the invention encompass using polynucleotides and polypeptides (including fragments and variants thereof, and also antibodies, agonists, and antagonists thereof) to prevent, diagnose, treat, or ameliorate a disease or disorder. In preferred embodiments, the present invention encompasses a method of preventing, diagnosing, treating, or ameliorating a disease or disorder (for example, as indicated in the “Preferred Indications” column of Tables 1D, and 1E) related to one, two, three, or more, of the cells, tissues, and organs where the polynucleotide and/or polypeptide is expressed (for example, as indicated in the “Tissue Distribution” column of Table 1B); comprising administering to a patient in which such prevention, diagnosis, treatment, or amelioration is desired a protein, nucleic acid, or antibody of the invention (or fragment or variant thereof) represented by Tables 1A, and 1B, in an amount effective to prevent, diagnose, treat, or ameliorate the indicated disease or disorder.

[0485] In another embodiment, the present invention also encompasses methods of preventing, diagnosing, treating, or ameliorating a disease or disorder related to one, two, three, or more, of the cells, tissues, and organs where the polynucleotide and/or polypeptide is expressed (for example, as indicated in the “Tissue Distribution” column of Table 1B) or as indicated in the “Preferred Indications” column of Tables 1D, and 1E; comprising administering to a patient diagnostic or therapeutic molecules in combination with proteins, nucleic acids, or antibodies of the invention (or fragments or variants thereof) as represented by Tables 1A, and 1B.

[0486] Polynucleotides and polypeptides corresponding to this gene are useful for diagnosis and/or treatment of gastrointestinal disorders, esophageal cancer, esophagitis, GERD, ulcers.

[0487] Features of Protein Encoded by Gene No: 83

[0488] The translation product of this gene shares sequence homology with apoliporotein D.

[0489] This gene is expressed primarily in esophageal cancer.

[0490] Polynucleotides and polypeptides of the invention are useful as reagents for differential identification of the tissue(s) or cell type(s) present in a biological sample and for diagnosis of diseases and conditions which include but are not limited to: esophageal cancer. Similarly, polypeptides and antibodies directed to these polypeptides are useful in providing immunological probes for differential identification of the tissue(s) or cell type(s). For a number of disorders of the above tissues or cells, particularly of the digestive system, expression of this gene at significantly higher or lower levels may be routinely detected in certain tissues or cell types (e.g., cancerous and wounded tissues) or bodily fluids (e.g., serum, plasma, urine, synovial fluid and spinal fluid) or another tissue or sample taken from an individual having such a disorder, relative to the standard gene expression level, i.e., the expression level in healthy tissue or bodily fluid from an individual not having the disorder.

[0491] Embodiments of the invention encompass using polynucleotides and polypeptides (including fragments and variants thereof, and also antibodies, agonists, and antagonists thereof) to prevent, diagnose, treat, or ameliorate a disease or disorder. In preferred embodiments, the present invention encompasses a method of preventing, diagnosing, treating, or ameliorating a disease or disorder (for example, as indicated in the “Preferred Indications” column of Tables 1D, and 1E) related to one, two, three, or more, of the cells, tissues, and organs where the polynucleotide and/or polypeptide is expressed (for example, as indicated in the “Tissue Distribution” column of Table 1B); comprising administering to a patient in which such prevention, diagnosis, treatment, or amelioration is desired a protein, nucleic acid, or antibody of the invention (or fragment or variant thereof) represented by Tables 1A, and 1B, in an amount effective to prevent, diagnose, treat, or ameliorate the indicated disease or disorder.

[0492] In another embodiment, the present invention also encompasses methods of preventing, diagnosing, treating, or ameliorating a disease or disorder related to one, two, three, or more, of the cells, tissues, and organs where the polynucleotide and/or polypeptide is expressed (for example, as indicated in the “Tissue Distribution” column of Table 1B) or as indicated in the “Preferred Indications” column of Tables 1D, and 1E; comprising administering to a patient diagnostic or therapeutic molecules in combination with proteins, nucleic acids, or antibodies of the invention (or fragments or variants thereof) as represented by Tables 1A, and 1B.

[0493] The tissue distribution indicates that polynucleotides and polypeptides corresponding to this gene are useful for the treatment and/or detection of esophageal cancer, esophagitis, gastroesophageal reflux disease and Barrett esophagus.

[0494] Features of Protein Encoded by Gene No: 84

[0495] The translation product of this gene shares sequence homology with bone marrow stromal cell protein.

[0496] This gene is expressed primarily in breast, ovarian, colon tumor and to a lesser extent in immune cell types and other cancers including esophageal cancer.

[0497] Polynucleotides and polypeptides of the invention are useful as reagents for differential identification of the tissue(s) or cell type(s) present in a biological sample and for diagnosis of diseases and conditions which include but are not limited to: cancer and immune disorders. Similarly, polypeptides and antibodies directed to these polypeptides are useful in providing immunological probes for differential identification of the tissue(s) or cell type(s). For a number of disorders of the above tissues or cells, particularly of the immune, reproductive and digestive systems, expression of this gene at significantly higher or lower levels may be routinely detected in certain tissues or cell types (e.g., cancerous and wounded tissues) or bodily fluids (e.g., serum, plasma, urine, synovial fluid and spinal fluid) or another tissue or sample taken from an individual having such a disorder, relative to the standard gene expression level, i.e., the expression level in healthy tissue or bodily fluid from an individual not having the disorder.

[0498] Embodiments of the invention encompass using polynucleotides and polypeptides (including fragments and variants thereof, and also antibodies, agonists, and antagonists thereof) to prevent, diagnose, treat, or ameliorate a disease or disorder. In preferred embodiments, the present invention encompasses a method of preventing, diagnosing, treating, or ameliorating a disease or disorder (for example, as indicated in the “Preferred Indications” column of Tables 1D, and 1E) related to one, two, three, or more, of the cells, tissues, and organs where the polynucleotide and/or polypeptide is expressed (for example, as indicated in the “Tissue Distribution” column of Table 1B); comprising administering to a patient in which such prevention, diagnosis, treatment, or amelioration is desired a protein, nucleic acid, or antibody of the invention (or fragment or variant thereof) represented by Tables 1A, and 1B, in an amount effective to prevent, diagnose, treat, or ameliorate the indicated disease or disorder.

[0499] In another embodiment, the present invention also encompasses methods of preventing, diagnosing, treating, or ameliorating a disease or disorder related to one, two, three, or more, of the cells, tissues, and organs where the polynucleotide and/or polypeptide is expressed (for example, as indicated in the “Tissue Distribution” column of Table 1B) or as indicated in the “Preferred Indications” column of Tables 1D, and 1E; comprising administering to a patient diagnostic or therapeutic molecules in combination with proteins, nucleic acids, or antibodies of the invention (or fragments or variants thereof) as represented by Tables 1A, and 1B.

[0500] The tissue distribution indicates that polynucleotides and polypeptides corresponding to this gene are useful for the treatment and/or detection of colon, ovarian, and breast cancer, in addition to immune disorders including autoimmune diseases, immune deficiencies, and leukemia, and esophageal disorders in general including esophagitis, gastroesophageal reflux disease and Barrett esophagus.

[0501] Features of Protein Encoded by Gene No: 85

[0502] The translation product of this gene shares sequence homology with bone marrow stromal cell protein.

[0503] This gene is expressed primarily in esophageal cancer.

[0504] Polynucleotides and polypeptides of the invention are useful as reagents for differential identification of the tissue(s) or cell type(s) present in a biological sample and for diagnosis of diseases and conditions which include but are not limited to: esophageal cancer. Similarly, polypeptides and antibodies directed to these polypeptides are useful in providing immunological probes for differential identification of the tissue(s) or cell type(s). For a number of disorders of the above tissues or cells, particularly of the digestive tract, expression of this gene at significantly higher or lower levels may be routinely detected in certain tissues or cell types (e.g., cancerous and wounded tissues) or bodily fluids (e.g., serum, plasma, urine, synovial fluid and spinal fluid) or another tissue or sample taken from an individual having such a disorder, relative to the standard gene expression level, i.e., the expression level in healthy tissue or bodily fluid from an individual not having the disorder.

[0505] Embodiments of the invention encompass using polynucleotides and polypeptides (including fragments and variants thereof, and also antibodies, agonists, and antagonists thereof) to prevent, diagnose, treat, or ameliorate a disease or disorder. In preferred embodiments, the present invention encompasses a method of preventing, diagnosing, treating, or ameliorating a disease or disorder (for example, as indicated in the “Preferred Indications” column of Tables 1D, and 1E) related to one, two, three, or more, of the cells, tissues, and organs where the polynucleotide and/or polypeptide is expressed (for example, as indicated in the “Tissue Distribution” column of Table 1B); comprising administering to a patient in which such prevention, diagnosis, treatment, or amelioration is desired a protein, nucleic acid, or antibody of the invention (or fragment or variant thereof) represented by Tables 1A, and 1B, in an amount effective to prevent, diagnose, treat, or ameliorate the indicated disease or disorder.

[0506] In another embodiment, the present invention also encompasses methods of preventing, diagnosing, treating, or ameliorating a disease or disorder related to one, two, three, or more, of the cells, tissues, and organs where the polynucleotide and/or polypeptide is expressed (for example, as indicated in the “Tissue Distribution” column of Table 1B) or as indicated in the “Preferred Indications” column of Tables 1D, and 1E; comprising administering to a patient diagnostic or therapeutic molecules in combination with proteins, nucleic acids, or antibodies of the invention (or fragments or variants thereof) as represented by Tables 1A, and 1B.

[0507] The tissue distribution indicates that polynucleotides and polypeptides corresponding to this gene are useful for the treatment and/or detection of esophageal disorders in general including esophageal cancer, esophagitis, gastroesophageal reflux disease and Barrett esophagus.

[0508] Features of Protein Encoded by Gene No: 86

[0509] The translation product of this gene is proteoglycan link protein precursor (cartilage link protein) which is important for the formation of proteoglycan aggregates and normal organization of hypertrophic chondrocytes,

[0510] This gene is expressed primarily in connective/epithelial (e.g., osteoclastoma and chondrosarcoma), musculoskeletal, neural/sensory (e.g., cancerous brain tissue), and mixed fetal tissues, and to a lesser extent in immune/hematopoietic, endocrine, reproductive, and cardiovascular tissues.

[0511] Polynucleotides and polypeptides of the invention are useful as reagents for differential identification of the tissue(s) or cell type(s) present in a biological sample and for diagnosis of diseases and conditions which include but are not limited to: disorders in connective/epithelial, musculoskeletal, neural/sensory, embryonic, immune/hematopoietic, endocrine, reproductive, and cardiovascular systems/organs including diseases such as autoimmune and inflammatory diseases, brain cancer, osteoclastoma and chondrosarcoma. Similarly, polypeptides and antibodies directed to these polypeptides are useful in providing immunological probes for differential identification of the tissue(s) or cell type(s). For a number of disorders of the above tissues or cells, particularly of the connective/epithelial, musculoskeletal, neural/sensory, embryonic, immune/hematopoietic, endocrine, reproductive, and cardiovascular, expression of this gene at significantly higher or lower levels may be routinely detected in certain tissues or cell types (e.g., cancerous and wounded tissues) or bodily fluids (e.g., serum, plasma, urine, synovial fluid and spinal fluid) or another tissue or sample taken from an individual having such a disorder, relative to the standard gene expression level, i.e., the expression level in healthy tissue or bodily fluid from an individual not having the disorder.

[0512] Embodiments of the invention encompass using polynucleotides and polypeptides (including fragments and variants thereof, and also antibodies, agonists, and antagonists thereof) to prevent, diagnose, treat, or ameliorate a disease or disorder. In preferred embodiments, the present invention encompasses a method of preventing, diagnosing, treating, or ameliorating a disease or disorder (for example, as indicated in the “Preferred Indications” column of Tables 1D, and 1E) related to one, two, three, or more, of the cells, tissues, and organs where the polynucleotide and/or polypeptide is expressed (for example, as indicated in the “Tissue Distribution” column of Table 1B); comprising administering to a patient in which such prevention, diagnosis, treatment, or amelioration is desired a protein, nucleic acid, or antibody of the invention (or fragment or variant thereof) represented by Tables 1A, and 1B, in an amount effective to prevent, diagnose, treat, or ameliorate the indicated disease or disorder.

[0513] In another embodiment, the present invention also encompasses methods of preventing, diagnosing, treating, or ameliorating a disease or disorder related to one, two, three, or more, of the cells, tissues, and organs where the polynucleotide and/or polypeptide is expressed (for example, as indicated in the “Tissue Distribution” column of Table 1B) or as indicated in the “Preferred Indications” column of Tables 1D, and 1E; comprising administering to a patient diagnostic or therapeutic molecules in combination with proteins, nucleic acids, or antibodies of the invention (or fragments or variants thereof) as represented by Tables 1A, and 1B.

[0514] The tissue distribution and homology to proteoglycan link protein precursor (cartilage link protein) indicates that polynucleotides and polypeptides corresponding to this gene are useful for treatment and diagnosis of disorders in connective/epithelial, musculoskeletal, neural/sensory, embryonic, immune/hematopoietic, endocrine, reproductive, and cardiovascular systems/organs including diseases such as autoimmune, inflammatory diseases, brain cancer, osteoclastoma and chondrosarcoma

[0515] Features of Protein Encoded by Gene No: 87

[0516] This gene is expressed primarily in germinal center B cells and to a lesser extent in fetal liver and spleen, placenta, testis, kidney, T cells, parathyroid tumor, fetal lung, colon tumor, infant brain, uterus, bone marrow, bone cancer, dendritic cells prostate, adipose, colon cancer, esophageal cancer and ovarian cancer.

[0517] Polynucleotides and polypeptides of the invention are useful as reagents for differential identification of the tissue(s) or cell type(s) present in a biological sample and for diagnosis of diseases and conditions which include but are not limited to cancer and other neoplasms. Similarly, polypeptides and antibodies directed to these polypeptides are useful in providing immunological probes for differential identification of the tissue(s) or cell type(s). For a number of disorders of the above tissues or cells, particularly of the gastrointestinal tract and immune system, expression of this gene at significantly higher or lower levels may be routinely detected in certain tissues or cell types (e.g., cancerous and wounded tissues) or bodily fluids (e.g., serum, plasma, urine, synovial fluid and spinal fluid) or another tissue or sample taken from an individual having such a disorder, relative to the standard gene expression level, i.e., the expression level in healthy tissue or bodily fluid from an individual not having the disorder.

[0518] Embodiments of the invention encompass using polynucleotides and polypeptides (including fragments and variants thereof, and also antibodies, agonists, and antagonists thereof) to prevent, diagnose, treat, or ameliorate a disease or disorder. In preferred embodiments, the present invention encompasses a method of preventing, diagnosing, treating, or ameliorating a disease or disorder (for example, as indicated in the “Preferred Indications” column of Tables 1D, and 1E) related to one, two, three, or more, of the cells, tissues, and organs where the polynucleotide and/or polypeptide is expressed (for example, as indicated in the “Tissue Distribution” column of Table 1B); comprising administering to a patient in which such prevention, diagnosis, treatment, or amelioration is desired a protein, nucleic acid, or antibody of the invention (or fragment or variant thereof) represented by Tables 1A, and 1B, in an amount effective to prevent, diagnose, treat, or ameliorate the indicated disease or disorder.

[0519] In another embodiment, the present invention also encompasses methods of preventing, diagnosing, treating, or ameliorating a disease or disorder related to one, two, three, or more, of the cells, tissues, and organs where the polynucleotide and/or polypeptide is expressed (for example, as indicated in the “Tissue Distribution” column of Table 1B) or as indicated in the “Preferred Indications” column of Tables 1D, and 1E; comprising administering to a patient diagnostic or therapeutic molecules in combination with proteins, nucleic acids, or antibodies of the invention (or fragments or variants thereof) as represented by Tables 1A, and 1B.

[0520] The tissue distribution indicates that polynucleotides and polypeptides corresponding to this gene are useful for the diagnosis and treatment of cancers or neoplasms especially of B cell lymphomas and GI tract tumors such as colon and esophageal tumors. The gene may be useful for targeting the tumors by antibodies or small molecules which act to either neutralize the activity of the encoded molecule, which may be essential for tumorigenesis. Alternately antibodies against the molecule may target the expressing cells for immunobased cytotoxicity.

[0521] Features of Protein Encoded by Gene No: 88

[0522] The translation product of this gene shares sequence homology with the complement subcomponent C1q.

[0523] This gene is expressed primarily in immune cells and to a lesser extent in most cell types in general including esophageal cancer.

[0524] Polynucleotides and polypeptides of the invention are useful as reagents for differential identification of the tissue(s) or cell type(s) present in a biological sample and for diagnosis of diseases and conditions which include but are not limited to: immune disorders and esophageal cancer. Similarly, polypeptides and antibodies directed to these polypeptides are useful in providing immunological probes for differential identification of the tissue(s) or cell type(s). For a number of disorders of the above tissues or cells, particularly of the digestive and immune systems, expression of this gene at significantly higher or lower levels may be routinely detected in certain tissues or cell types (e.g., cancerous and wounded tissues) or bodily fluids (e.g., serum, plasma, urine, synovial fluid and spinal fluid) or another tissue or sample taken from an individual having such a disorder, relative to the standard gene expression level, i.e., the expression level in healthy tissue or bodily fluid from an individual not having the disorder.

[0525] Embodiments of the invention encompass using polynucleotides and polypeptides (including fragments and variants thereof, and also antibodies, agonists, and antagonists thereof) to prevent, diagnose, treat, or ameliorate a disease or disorder. In preferred embodiments, the present invention encompasses a method of preventing, diagnosing, treating, or ameliorating a disease or disorder (for example, as indicated in the “Preferred Indications” column of Tables 1D, and 1E) related to one, two, three, or more, of the cells, tissues, and organs where the polynucleotide and/or polypeptide is expressed (for example, as indicated in the “Tissue Distribution” column of Table 1B); comprising administering to a patient in which such prevention, diagnosis, treatment, or amelioration is desired a protein, nucleic acid, or antibody of the invention (or fragment or variant thereof) represented by Tables 1A, and 1B, in an amount effective to prevent, diagnose, treat, or ameliorate the indicated disease or disorder.

[0526] In another embodiment, the present invention also encompasses methods of preventing, diagnosing, treating, or ameliorating a disease or disorder related to one, two, three, or more, of the cells, tissues, and organs where the polynucleotide and/or polypeptide is expressed (for example, as indicated in the “Tissue Distribution” column of Table 1B) or as indicated in the “Preferred Indications” column of Tables 1D, and 1E; comprising administering to a patient diagnostic or therapeutic molecules in combination with proteins, nucleic acids, or antibodies of the invention (or fragments or variants thereof) as represented by Tables 1A, and 1B.

[0527] The tissue distribution indicates that polynucleotides and polypeptides corresponding to this gene are useful for the treatment and/or detection of immune disorders and esophageal cancer, esophagitis, gastroesophageal reflux disease and Barrett esophagus.

[0528] Features of Protein Encoded by Gene No: 89

[0529] The translation product of this gene shares sequence homology with von Ebner minor salivary gland protein.

[0530] This gene is expressed primarily in esophageal cancer.

[0531] Polynucleotides and polypeptides of the invention are useful as reagents for differential identification of the tissue(s) or cell type(s) present in a biological sample and for diagnosis of diseases and conditions which include but are not limited to: Crohn's disease, intestinal bowel disease, ulcer, esophageal cancer, esophagitis, gastroesophageal reflux disease and Barrett's esophagus. Similarly, polypeptides and antibodies directed to these polypeptides are useful in providing immunological probes for differential identification of the tissue(s) or cell type(s). For a number of disorders of the above tissues or cells, particularly of the digestive/gastrointestinal system, expression of this gene at significantly higher or lower levels may be routinely detected in certain tissues or cell types (e.g., cancerous and wounded tissues) or bodily fluids (e.g., serum, plasma, urine, synovial fluid and spinal fluid) or another tissue or sample taken from an individual having such a disorder, relative to the standard gene expression level, i.e., the expression level in healthy tissue or bodily fluid from an individual not having the disorder.

[0532] Embodiments of the invention encompass using polynucleotides and polypeptides (including fragments and variants thereof, and also antibodies, agonists, and antagonists thereof) to prevent, diagnose, treat, or ameliorate a disease or disorder. In preferred embodiments, the present invention encompasses a method of preventing, diagnosing, treating, or ameliorating a disease or disorder (for example, as indicated in the “Preferred Indications” column of Tables 1D, and 1E) related to one, two, three, or more, of the cells, tissues, and organs where the polynucleotide and/or polypeptide is expressed (for example, as indicated in the “Tissue Distribution” column of Table 1B); comprising administering to a patient in which such prevention, diagnosis, treatment, or amelioration is desired a protein, nucleic acid, or antibody of the invention (or fragment or variant thereof) represented by Tables 1A, and 1B, in an amount effective to prevent, diagnose, treat, or ameliorate the indicated disease or disorder.

[0533] In another embodiment, the present invention also encompasses methods of preventing, diagnosing, treating, or ameliorating a disease or disorder related to one, two, three, or more, of the cells, tissues, and organs where the polynucleotide and/or polypeptide is expressed (for example, as indicated in the “Tissue Distribution” column of Table 1B) or as indicated in the “Preferred Indications” column of Tables 1D, and 1E; comprising administering to a patient diagnostic or therapeutic molecules in combination with proteins, nucleic acids, or antibodies of the invention (or fragments or variants thereof) as represented by Tables 1A, and 1B.

[0534] The tissue distribution indicates that polynucleotides and polypeptides corresponding to this gene are useful for the treatment and/or detection of esophageal cancer, esophagitis, gastroesophageal reflux disease and Barrett esophagus.

[0535] Features of Protein Encoded by Gene No: 90

[0536] This gene is expressed primarily in placenta, heart and esophagus.

[0537] Polynucleotides and polypeptides of the invention are useful as reagents for differential identification of the tissue(s) or cell type(s) present in a biological sample and for diagnosis of diseases and conditions which include but are not limited to: esophageal cancer and female reproductive disorders. Similarly, polypeptides and antibodies directed to these polypeptides are useful in providing immunological probes for differential identification of the tissue(s) or cell type(s). For a number of disorders of the above tissues or cells, particularly of the digestive tract, reproductive systems and cardiovascular systems, expression of this gene at significantly higher or lower levels may be routinely detected in certain tissues or cell types (e.g., cancerous and wounded tissues) or bodily fluids (e.g., serum, plasma, urine, synovial fluid and spinal fluid) or another tissue or sample taken from an individual having such a disorder, relative to the standard gene expression level, i.e., the expression level in healthy tissue or bodily fluid from an individual not having the disorder.

[0538] Embodiments of the invention encompass using polynucleotides and polypeptides (including fragments and variants thereof, and also antibodies, agonists, and antagonists thereof) to prevent, diagnose, treat, or ameliorate a disease or disorder. In preferred embodiments, the present invention encompasses a method of preventing, diagnosing, treating, or ameliorating a disease or disorder (for example, as indicated in the “Preferred Indications” column of Tables 1D, and 1E) related to one, two, three, or more, of the cells, tissues, and organs where the polynucleotide and/or polypeptide is expressed (for example, as indicated in the “Tissue Distribution” column of Table 1B); comprising administering to a patient in which such prevention, diagnosis, treatment, or amelioration is desired a protein, nucleic acid, or antibody of the invention (or fragment or variant thereof) represented by Tables 1A, and 1B, in an amount effective to prevent, diagnose, treat, or ameliorate the indicated disease or disorder.

[0539] In another embodiment, the present invention also encompasses methods of preventing, diagnosing, treating, or ameliorating a disease or disorder related to one, two, three, or more, of the cells, tissues, and organs where the polynucleotide and/or polypeptide is expressed (for example, as indicated in the “Tissue Distribution” column of Table 1B) or as indicated in the “Preferred Indications” column of Tables 1D, and 1E; comprising administering to a patient diagnostic or therapeutic molecules in combination with proteins, nucleic acids, or antibodies of the invention (or fragments or variants thereof) as represented by Tables 1A, and 1B.

[0540] The tissue distribution indicates that polynucleotides and polypeptides corresponding to this gene are useful for the treatment and/or detection of esophageal cancer, esophagitis, gastroesophageal reflux disease and Barrett esophagus in addition to female reproductive orders including those associated with pregnancy and cardiovascular disorders.

[0541] Features of Protein Encoded by Gene No: 91

[0542] The translation product of this gene shares sequence homology with bone marrow stromal cell protein.

[0543] This gene is expressed primarily in esophagus.

[0544] Polynucleotides and polypeptides of the invention are useful as reagents for differential identification of the tissue(s) or cell type(s) present in a biological sample and for diagnosis of diseases and conditions which include but are not limited to: esophagus related disorders. Similarly, polypeptides and antibodies directed to these polypeptides are useful in providing immunological probes for differential identification of the tissue(s) or cell type(s). For a number of disorders of the above tissues or cells, particularly of the digestive tract, expression of this gene at significantly higher or lower levels may be routinely detected in certain tissues or cell types (e.g., cancerous and wounded tissues) or bodily fluids (e.g., serum, plasma, urine, synovial fluid and spinal fluid) or another tissue or sample taken from an individual having such a disorder, relative to the standard gene expression level, i.e., the expression level in healthy tissue or bodily fluid from an individual not having the disorder.

[0545] Embodiments of the invention encompass using polynucleotides and polypeptides (including fragments and variants thereof, and also antibodies, agonists, and antagonists thereof) to prevent, diagnose, treat, or ameliorate a disease or disorder. In preferred embodiments, the present invention encompasses a method of preventing, diagnosing, treating, or ameliorating a disease or disorder (for example, as indicated in the “Preferred Indications” column of Tables 1D, and 1E) related to one, two, three, or more, of the cells, tissues, and organs where the polynucleotide and/or polypeptide is expressed (for example, as indicated in the “Tissue Distribution” column of Table 1B); comprising administering to a patient in which such prevention, diagnosis, treatment, or amelioration is desired a protein, nucleic acid, or antibody of the invention (or fragment or variant thereof) represented by Tables 1A, and 1B, in an amount effective to prevent, diagnose, treat, or ameliorate the indicated disease or disorder.

[0546] In another embodiment, the present invention also encompasses methods of preventing, diagnosing, treating, or ameliorating a disease or disorder related to one, two, three, or more, of the cells, tissues, and organs where the polynucleotide and/or polypeptide is expressed (for example, as indicated in the “Tissue Distribution” column of Table 1B) or as indicated in the “Preferred Indications” column of Tables 1D, and 1E; comprising administering to a patient diagnostic or therapeutic molecules in combination with proteins, nucleic acids, or antibodies of the invention (or fragments or variants thereof) as represented by Tables 1A, and 1B.

[0547] The tissue distribution indicates that polynucleotides and polypeptides corresponding to this gene are useful for the treatment and/or detection of esophageal disorders in general including esophagitis, gastroesophageal reflux disease and Barrett esophagus.

[0548] Features of Protein Encoded by Gene No: 92

[0549] This gene is expressed primarily in Soares ovary tumor (NbHOT), Stomach Normal, Soares_NSF_F8_{—}9W_OT_PA_P_S1, Soares_NhHMPu_S1 and to a lesser extent in a variety of other cell types.

[0550] Polynucleotides and polypeptides of the invention are useful as reagents for differential identification of the tissue(s) or cell type(s) present in a biological sample and for diagnosis of diseases and conditions which include but are not limited to: cancer and other proliferative disorders. Similarly, polypeptides and antibodies directed to these polypeptides are useful in providing immunological probes for differential identification of the tissue(s) or cell type(s). For a number of disorders of the above tissues or cells, particularly of the reproductive and digestive systems, expression of this gene at significantly higher or lower levels may be routinely detected in certain tissues or cell types (e.g., cancerous and wounded tissues) or bodily fluids (e.g., serum, plasma, urine, synovial fluid and spinal fluid) or another tissue or sample taken from an individual having such a disorder, relative to the standard gene expression level, i.e., the expression level in healthy tissue or bodily fluid from an individual not having the disorder. Supernatants from cells transiently transfected with this gene have been shown to induce IL-2 production in Human T-cell 2B9 cell lines, suggesting a role in modulation of human immune response.

[0551] Embodiments of the invention encompass using polynucleotides and polypeptides (including fragments and variants thereof, and also antibodies, agonists, and antagonists thereof) to prevent, diagnose, treat, or ameliorate a disease or disorder. In preferred embodiments, the present invention encompasses a method of preventing, diagnosing, treating, or ameliorating a disease or disorder (for example, as indicated in the “Preferred Indications” column of Tables 1D, and 1E) related to one, two, three, or more, of the cells, tissues, and organs where the polynucleotide and/or polypeptide is expressed (for example, as indicated in the “Tissue Distribution” column of Table 1B); comprising administering to a patient in which such prevention, diagnosis, treatment, or amelioration is desired a protein, nucleic acid, or antibody of the invention (or fragment or variant thereof) represented by Tables 1A, and 1B, in an amount effective to prevent, diagnose, treat, or ameliorate the indicated disease or disorder.

[0552] In another embodiment, the present invention also encompasses methods of preventing, diagnosing, treating, or ameliorating a disease or disorder related to one, two, three, or more, of the cells, tissues, and organs where the polynucleotide and/or polypeptide is expressed (for example, as indicated in the “Tissue Distribution” column of Table 1B) or as indicated in the “Preferred Indications” column of Tables 1D, and 1E; comprising administering to a patient diagnostic or therapeutic molecules in combination with proteins, nucleic acids, or antibodies of the invention (or fragments or variants thereof) as represented by Tables 1A, and 1B.

[0553] The tissue distribution indicates that polynucleotides and polypeptides corresponding to this gene are useful for diagnosis and treatment of cancer and other proliferative disorders. In addition, the ability of supernatants from transiently transfected cells to induce IL2 production in T-cells suggests a role in immune modulation.

[0554] Features of Protein Encoded by Gene No: 93

[0555] This gene is expressed primarily in liver, spleen and esophageal cancer.

[0556] Polynucleotides and polypeptides of the invention are useful as reagents for differential identification of the tissue(s) or cell type(s) present in a biological sample and for diagnosis of diseases and conditions which include but are not limited to: disorders of the gastrointestinal tract, GERD, esophageal cancer, immune disorders. Similarly, polypeptides and antibodies directed to these polypeptides are useful in providing immunological probes for differential identification of the tissue(s) or cell type(s). For a number of disorders of the above tissues or cells, particularly of the immune system, liver, gastrointestinal tract, expression of this gene at significantly higher or lower levels may be routinely detected in certain tissues or cell types (e.g., cancerous and wounded tissues) or bodily fluids (e.g., serum, plasma, urine, synovial fluid and spinal fluid) or another tissue or sample taken from an individual having such a disorder, relative to the standard gene expression level, i.e., the expression level in healthy tissue or bodily fluid from an individual not having the disorder.

[0557] Embodiments of the invention encompass using polynucleotides and polypeptides (including fragments and variants thereof, and also antibodies, agonists, and antagonists thereof) to prevent, diagnose, treat, or ameliorate a disease or disorder. In preferred embodiments, the present invention encompasses a method of preventing, diagnosing, treating, or ameliorating a disease or disorder (for example, as indicated in the “Preferred Indications” column of Tables 1D, and 1E) related to one, two, three, or more, of the cells, tissues, and organs where the polynucleotide and/or polypeptide is expressed (for example, as indicated in the “Tissue Distribution” column of Table 1B); comprising administering to a patient in which such prevention, diagnosis, treatment, or amelioration is desired a protein, nucleic acid, or antibody of the invention (or fragment or variant thereof) represented by Tables 1A, and 1B, in an amount effective to prevent, diagnose, treat, or ameliorate the indicated disease or disorder.

[0558] In another embodiment, the present invention also encompasses methods of preventing, diagnosing, treating, or ameliorating a disease or disorder related to one, two, three, or more, of the cells, tissues, and organs where the polynucleotide and/or polypeptide is expressed (for example, as indicated in the “Tissue Distribution” column of Table 1B) or as indicated in the “Preferred Indications” column of Tables 1D, and 1E; comprising administering to a patient diagnostic or therapeutic molecules in combination with proteins, nucleic acids, or antibodies of the invention (or fragments or variants thereof) as represented by Tables 1A, and 1B.

[0559] Polynucleotides and polypeptides corresponding to this gene are useful for diagnosis and/or treatment for immune disorders, esophageal cancer, disorders of the gastrointestinal tract, GERD, disorders of the liver.

[0560] Features of Protein Encoded by Gene No: 94

[0561] The translation product of this gene shares sequence homology with multi-spanning transmembrane proteins.

[0562] This gene is expressed primarily in esophageal cancer.

[0563] Polynucleotides and polypeptides of the invention are useful as reagents for differential identification of the tissue(s) or cell type(s) present in a biological sample and for diagnosis of diseases and conditions which include but are not limited to: esophageal cancer. Similarly, polypeptides and antibodies directed to these polypeptides are useful in providing immunological probes for differential identification of the tissue(s) or cell type(s). For a number of disorders of the above tissues or cells, particularly of the digestive system, expression of this gene at significantly higher or lower levels may be routinely detected in certain tissues or cell types (e.g., cancerous and wounded tissues) or bodily fluids (e.g., serum, plasma, urine, synovial fluid and spinal fluid) or another tissue or sample taken from an individual having such a disorder, relative to the standard gene expression level, i.e., the expression level in healthy tissue or bodily fluid from an individual not having the disorder.

[0564] Embodiments of the invention encompass using polynucleotides and polypeptides (including fragments and variants thereof, and also antibodies, agonists, and antagonists thereof) to prevent, diagnose, treat, or ameliorate a disease or disorder. In preferred embodiments, the present invention encompasses a method of preventing, diagnosing, treating, or ameliorating a disease or disorder (for example, as indicated in the “Preferred Indications” column of Tables 1D, and 1E) related to one, two, three, or more, of the cells, tissues, and organs where the polynucleotide and/or polypeptide is expressed (for example, as indicated in the “Tissue Distribution” column of Table 1B); comprising administering to a patient in which such prevention, diagnosis, treatment, or amelioration is desired a protein, nucleic acid, or antibody of the invention (or fragment or variant thereof) represented by Tables 1A, and 1B, in an amount effective to prevent, diagnose, treat, or ameliorate the indicated disease or disorder.

[0565] In another embodiment, the present invention also encompasses methods of preventing, diagnosing, treating, or ameliorating a disease or disorder related to one, two, three, or more, of the cells, tissues, and organs where the polynucleotide and/or polypeptide is expressed (for example, as indicated in the “Tissue Distribution” column of Table 1B) or as indicated in the “Preferred Indications” column of Tables 1D, and 1E; comprising administering to a patient diagnostic or therapeutic molecules in combination with proteins, nucleic acids, or antibodies of the invention (or fragments or variants thereof) as represented by Tables 1A, and 1B.

[0566] The tissue distribution indicates that polynucleotides and polypeptides corresponding to this gene are useful for the treatment and/or detection of esophageal cancer, esophagitis, gastroesophageal reflux disease and Barrett esophagus.

[0567] Features of Protein Encoded by Gene No: 95

[0568] This gene is expressed primarily in different tumor tissues (e.g., colon, liver, osteoclastoma) and to a lesser extent in normal cells and tissues.

[0569] Polynucleotides and polypeptides of the invention are useful as reagents for differential identification of the tissue(s) or cell type(s) present in a biological sample and for diagnosis of diseases and conditions which include but are not limited to: cancers originating from several different tissue types. Similarly, polypeptides and antibodies directed to these polypeptides are useful in providing immunological probes for differential identification of the tissue(s) or cell type(s). For a number of disorders of the above tissues or cells, particularly of the bone and immune system, expression of this gene at significantly higher or lower levels may be routinely detected in certain tissues or cell types (e.g., cancerous and wounded tissues) or bodily fluids (e.g., serum, plasma, urine, synovial fluid and spinal fluid) or another tissue or sample taken from an individual having such a disorder, relative to the standard gene expression level, i.e., the expression level in healthy tissue or bodily fluid from an individual not having the disorder.

[0570] Embodiments of the invention encompass using polynucleotides and polypeptides (including fragments and variants thereof, and also antibodies, agonists, and antagonists thereof) to prevent, diagnose, treat, or ameliorate a disease or disorder. In preferred embodiments, the present invention encompasses a method of preventing, diagnosing, treating, or ameliorating a disease or disorder (for example, as indicated in the “Preferred Indications” column of Tables 1D, and 1E) related to one, two, three, or more, of the cells, tissues, and organs where the polynucleotide and/or polypeptide is expressed (for example, as indicated in the “Tissue Distribution” column of Table 1B); comprising administering to a patient in which such prevention, diagnosis, treatment, or amelioration is desired a protein, nucleic acid, or antibody of the invention (or fragment or variant thereof) represented by Tables 1A, and 1B, in an amount effective to prevent, diagnose, treat, or ameliorate the indicated disease or disorder.

[0571] In another embodiment, the present invention also encompasses methods of preventing, diagnosing, treating, or ameliorating a disease or disorder related to one, two, three, or more, of the cells, tissues, and organs where the polynucleotide and/or polypeptide is expressed (for example, as indicated in the “Tissue Distribution” column of Table 1B) or as indicated in the “Preferred Indications” column of Tables 1D, and 1E; comprising administering to a patient diagnostic or therapeutic molecules in combination with proteins, nucleic acids, or antibodies of the invention (or fragments or variants thereof) as represented by Tables 1A, and 1B.

[0572] Polynucleotides and polypeptides corresponding to this gene are useful for treatment and diagnosis of different cancers (e.g., colon, liver, osteoclastoma).

[0573] Features of Protein Encoded by Gene No: 96

[0574] This gene is expressed primarily in pancreas, both normal and cancerous.

[0575] Polynucleotides and polypeptides of the invention are useful as reagents for differential identification of the tissue(s) or cell type(s) present in a biological sample and for diagnosis of diseases and conditions which include but are not limited to: pancreatic cancer. Similarly, polypeptides and antibodies directed to these polypeptides are useful in providing immunological probes for differential identification of the tissue(s) or cell type(s). For a number of disorders of the above tissues or cells, particularly of the pancreas, expression of this gene at significantly higher or lower levels may be routinely detected in certain tissues or cell types (e.g., cancerous and wounded tissues) or bodily fluids (e.g. serum, plasma, urine, synovial fluid and spinal fluid) or another tissue or sample taken from an individual having such a disorder, relative to the standard gene expression level, i.e., the expression level in healthy tissue or bodily fluid from an individual not having the disorder.

[0576] Embodiments of the invention encompass using polynucleotides and polypeptides (including fragments and variants thereof, and also antibodies, agonists, and antagonists thereof) to prevent, diagnose, treat, or ameliorate a disease or disorder. In preferred embodiments, the present invention encompasses a method of preventing, diagnosing, treating, or ameliorating a disease or disorder (for example, as indicated in the “Preferred Indications” column of Tables 1D, and 1E) related to one, two, three, or more, of the cells, tissues, and organs where the polynucleotide and/or polypeptide is expressed (for example, as indicated in the “Tissue Distribution” column of Table 1B); comprising administering to a patient in which such prevention, diagnosis, treatment, or amelioration is desired a protein, nucleic acid, or antibody of the invention (or fragment or variant thereof) represented by Tables 1A, and 1B, in an amount effective to prevent, diagnose, treat, or ameliorate the indicated disease or disorder.

[0577] In another embodiment, the present invention also encompasses methods of preventing, diagnosing, treating, or ameliorating a disease or disorder related to one, two, three, or more, of the cells, tissues, and organs where the polynucleotide and/or polypeptide is expressed (for example, as indicated in the “Tissue Distribution” column of Table 1B) or as indicated in the “Preferred Indications” column of Tables 1D, and 1E; comprising administering to a patient diagnostic or therapeutic molecules in combination with proteins, nucleic acids, or antibodies of the invention (or fragments or variants thereof) as represented by Tables 1A, and 1B.

[0578] Polynucleotides and polypeptides corresponding to this gene are useful for treatment and/or diagnosis of pancreatic cancers and other disorders of the endocrine system (e.g., diabetes).

[0579] Features of Protein Encoded by Gene No: 97

[0580] This gene is expressed in Human Lung Cancer, subtracted; Larynx Normal; NCI_CGAP_Eso2; Human Fetal Epithelium (Skin); Healing groin wound—zero hr post-incision (control); Esophageal Cancer #2109A5A ductal carcinoma; NCI_CGAP_Co3.

[0581] Polynucleotides and polypeptides of the invention are useful as reagents for differential identification of the tissue(s) or cell type(s) present in a biological sample and for diagnosis of diseases and conditions which include but are not limited to: cancer and other proliferative disorders. Similarly, polypeptides and antibodies directed to these polypeptides are useful in providing immunological probes for differential identification of the tissue(s) or cell type(s). For a number of disorders of the above tissues or cells, particularly of the immune system, skin, and esophagus, expression of this gene at significantly higher or lower levels may be routinely detected in certain tissues or cell types (e.g., cancerous and wounded tissues) or bodily fluids (e.g., serum, plasma, urine, synovial fluid and spinal fluid) or another tissue or sample taken from an individual having such a disorder, relative to the standard gene expression level, i.e., the expression level in healthy tissue or bodily fluid from an individual not having the disorder.

[0582] Embodiments of the invention encompass using polynucleotides and polypeptides (including fragments and variants thereof, and also antibodies, agonists, and antagonists thereof) to prevent, diagnose, treat, or ameliorate a disease or disorder. In preferred embodiments, the present invention encompasses a method of preventing, diagnosing, treating, or ameliorating a disease or disorder (for example, as indicated in the “Preferred Indications” column of Tables 1D, and 1E) related to one, two, three, or more, of the cells, tissues, and organs where the polynucleotide and/or polypeptide is expressed (for example, as indicated in the “Tissue Distribution” column of Table 1B); comprising administering to a patient in which such prevention, diagnosis, treatment, or amelioration is desired a protein, nucleic acid, or antibody of the invention (or fragment or variant thereof) represented by Tables 1A, and 1B, in an amount effective to prevent, diagnose, treat, or ameliorate the indicated disease or disorder.

[0583] In another embodiment, the present invention also encompasses methods of preventing, diagnosing, treating, or ameliorating a disease or disorder related to one, two, three, or more, of the cells, tissues, and organs where the polynucleotide and/or polypeptide is expressed (for example, as indicated in the “Tissue Distribution” column of Table 1B) or as indicated in the “Preferred Indications” column of Tables 1D, and 1E; comprising administering to a patient diagnostic or therapeutic molecules in combination with proteins, nucleic acids, or antibodies of the invention (or fragments or variants thereof) as represented by Tables 1A, and 1B.

[0584] The tissue distribution indicates that polynucleotides and polypeptides corresponding to this gene are useful for diagnosis and treatment of cancer and other proliferative disorders, particularly of the skin, lung and esophagus.

[0585] Features of Protein Encoded by Gene No: 98

[0586] This gene is expressed primarily in ovarian cancer and to a lesser extent in tumors of the lung and pancreas

[0587] Polynucleotides and polypeptides of the invention are useful as reagents for differential identification of the tissue(s) or cell type(s) present in a biological sample and for diagnosis of diseases and conditions which include but are not limited to ovarian cancer. Similarly, polypeptides and antibodies directed to these polypeptides are useful in providing immunological probes for differential identification of the tissue(s) or cell type(s). For a number of disorders of the above tissues or cells, particularly of the reproductive system, expression of this gene at significantly higher or lower levels may be routinely detected in certain tissues or cell types (e.g., cancerous and wounded tissues) or bodily fluids (e.g., serum, plasma, urine, synovial fluid and spinal fluid) or another tissue or sample taken from an individual having such a disorder, relative to the standard gene expression level, i.e., the expression level in healthy tissue or bodily fluid from an individual not having the disorder.

[0588] Embodiments of the invention encompass using polynucleotides and polypeptides (including fragments and variants thereof, and also antibodies, agonists, and antagonists thereof) to prevent, diagnose, treat, or ameliorate a disease or disorder. In preferred embodiments, the present invention encompasses a method of preventing, diagnosing, treating, or ameliorating a disease or disorder (for example, as indicated in the “Preferred Indications” column of Tables 1D, and 1E) related to one, two, three, or more, of the cells, tissues, and organs where the polynucleotide and/or polypeptide is expressed (for example, as indicated in the “Tissue Distribution” column of Table 1B); comprising administering to a patient in which such prevention, diagnosis, treatment, or amelioration is desired a protein, nucleic acid, or antibody of the invention (or fragment or variant thereof) represented by Tables 1A, and 1B, in an amount effective to prevent, diagnose, treat, or ameliorate the indicated disease or disorder.

[0589] In another embodiment, the present invention also encompasses methods of preventing, diagnosing, treating, or ameliorating a disease or disorder related to one, two, three, or more, of the cells, tissues, and organs where the polynucleotide and/or polypeptide is expressed (for example, as indicated in the “Tissue Distribution” column of Table 1B) or as indicated in the “Preferred Indications” column of Tables 1D, and 1E; comprising administering to a patient diagnostic or therapeutic molecules in combination with proteins, nucleic acids, or antibodies of the invention (or fragments or variants thereof) as represented by Tables 1A, and 1B.

[0590] The tissue distribution indicates that polynucleotides and polypeptides corresponding to this gene are useful for in the diagnosis or treatment of a variety of solid tumors including neoplasms of the ovary, lung, and pancreas.

[0591] Features of Protein Encoded by Gene No: 99

[0592] This gene is expressed primarily in colon cancer and to a lesser extent in neoplasms of the pancreas and uterus.

[0593] Polynucleotides and polypeptides of the invention are useful as reagents for differential identification of the tissue(s) or cell type(s) present in a biological sample and for diagnosis of diseases and conditions which include but are not limited to colon cancer. Similarly, polypeptides and antibodies directed to these polypeptides are useful in providing immunological probes for differential identification of the tissue(s) or cell type(s). For a number of disorders of the above tissues or cells, particularly of the digestive system, expression of this gene at significantly higher or lower levels may be routinely detected in certain tissues or cell types (e.g., cancerous and wounded tissues) or bodily fluids (e.g., serum, plasma, urine, synovial fluid and spinal fluid) or another tissue or sample taken from an individual having such a disorder, relative to the standard gene expression level, i.e., the expression level in healthy tissue or bodily fluid from an individual not having the disorder.

[0594] Embodiments of the invention encompass using polynucleotides and polypeptides (including fragments and variants thereof, and also antibodies, agonists, and antagonists thereof) to prevent, diagnose, treat, or ameliorate a disease or disorder. In preferred embodiments, the present invention encompasses a method of preventing, diagnosing, treating, or ameliorating a disease or disorder (for example, as indicated in the “Preferred Indications” column of Tables 1D, and 1E) related to one, two, three, or more, of the cells, tissues, and organs where the polynucleotide and/or polypeptide is expressed (for example, as indicated in the “Tissue Distribution” column of Table 1B); comprising administering to a patient in which such prevention, diagnosis, treatment, or amelioration is desired a protein, nucleic acid, or antibody of the invention (or fragment or variant thereof) represented by Tables 1A, and 1B, in an amount effective to prevent, diagnose, treat, or ameliorate the indicated disease or disorder.

[0595] In another embodiment, the present invention also encompasses methods of preventing, diagnosing, treating, or ameliorating a disease or disorder related to one, two, three, or more, of the cells, tissues, and organs where the polynucleotide and/or polypeptide is expressed (for example, as indicated in the “Tissue Distribution” column of Table 1B) or as indicated in the “Preferred Indications” column of Tables 1D, and 1E; comprising administering to a patient diagnostic or therapeutic molecules in combination with proteins, nucleic acids, or antibodies of the invention (or fragments or variants thereof) as represented by Tables 1A, and 1B.

[0596] The tissue distribution indicates that polynucleotides and polypeptides corresponding to this gene are useful for in the diagnosis and treatment of a number of solid tumors including neoplasms of the colon, pancreas, uterus and prostate.

[0597] Features of Protein Encoded by Gene No: 100

[0598] This gene is expressed primarily in uterus (malignant) and to a lesser extent in esophagus, brain and pancreas.

[0599] Polynucleotides and polypeptides of the invention are useful as reagents for differential identification of the tissue(s) or cell type(s) present in a biological sample and for diagnosis of diseases and conditions which include but are not limited to: disorders of the reproductive tract, including cancer, diabetes, esophagitis, GERD, esophageal cancer, ulcers, disorders of the central nervous system. Similarly, polypeptides and antibodies directed to these polypeptides are useful in providing immunological probes for differential identification of the tissue(s) or cell type(s). For a number of disorders of the above tissues or cells, particularly of the reproductive system, GI tract, brain and pancreas, expression of this gene at significantly higher or lower levels may be routinely detected in certain tissues or cell types (e.g., cancerous and wounded tissues) or bodily fluids (e.g., serum, plasma, urine, synovial fluid and spinal fluid) or another tissue or sample taken from an individual having such a disorder, relative to the standard gene expression level, i.e., the expression level in healthy tissue or bodily fluid from an individual not having the disorder.

[0600] Embodiments of the invention encompass using polynucleotides and polypeptides (including fragments and variants thereof, and also antibodies, agonists, and antagonists thereof) to prevent, diagnose, treat, or ameliorate a disease or disorder. In preferred embodiments, the present invention encompasses a method of preventing, diagnosing, treating, or ameliorating a disease or disorder (for example, as indicated in the “Preferred Indications” column of Tables 1D, and 1E) related to one, two, three, or more, of the cells, tissues, and organs where the polynucleotide and/or polypeptide is expressed (for example, as indicated in the “Tissue Distribution” column of Table 1B); comprising administering to a patient in which such prevention, diagnosis, treatment, or amelioration is desired a protein, nucleic acid, or antibody of the invention (or fragment or variant thereof) represented by Tables 1A, and 1B, in an amount effective to prevent, diagnose, treat, or ameliorate the indicated disease or disorder.

[0601] In another embodiment, the present invention also encompasses methods of preventing, diagnosing, treating, or ameliorating a disease or disorder related to one, two, three, or more, of the cells, tissues, and organs where the polynucleotide and/or polypeptide is expressed (for example, as indicated in the “Tissue Distribution” column of Table 1B) or as indicated in the “Preferred Indications” column of Tables 1D, and 1E; comprising administering to a patient diagnostic or therapeutic molecules in combination with proteins, nucleic acids, or antibodies of the invention (or fragments or variants thereof) as represented by Tables 1A, and 1B.

[0602] Polynucleotides and polypeptides corresponding to this gene are useful for disorders of the reproductive tract, including cancer, diabetes, esophagitis, GERD, esophageal cancer, ulcers, and disorders of the central nervous system.

[0603] Features of Protein Encoded by Gene No: 101

[0604] This gene is expressed primarily in colon, stomach and eosinophils and to a lesser extent in most digestive and immune cell types including malignant esophagus.

[0605] Polynucleotides and polypeptides of the invention are useful as reagents for differential identification of the tissue(s) or cell type(s) present in a biological sample and for diagnosis of diseases and conditions which include but are not limited to: digestive tract disorders and autoimmune diseases. Similarly, polypeptides and antibodies directed to these polypeptides are useful in providing immunological probes for differential identification of the tissue(s) or cell type(s). For a number of disorders of the above tissues or cells, particularly of the digestive and immune systems, expression of this gene at significantly higher or lower levels may be routinely detected in certain tissues or cell types (e.g., cancerous and wounded tissues) or bodily fluids (e.g., serum, plasma, urine, synovial fluid and spinal fluid) or another tissue or sample taken from an individual having such a disorder, relative to the standard gene expression level, i.e., the expression level in healthy tissue or bodily fluid from an individual not having the disorder.

[0606] Embodiments of the invention encompass using polynucleotides and polypeptides (including fragments and variants thereof, and also antibodies, agonists, and antagonists thereof) to prevent, diagnose, treat, or ameliorate a disease or disorder. In preferred embodiments, the present invention encompasses a method of preventing, diagnosing, treating, or ameliorating a disease or disorder (for example, as indicated in the “Preferred Indications” column of Tables 1D, and 1E) related to one, two, three, or more, of the cells, tissues, and organs where the polynucleotide and/or polypeptide is expressed (for example, as indicated in the “Tissue Distribution” column of Table 1B); comprising administering to a patient in which such prevention, diagnosis, treatment, or amelioration is desired a protein, nucleic acid, or antibody of the invention (or fragment or variant thereof) represented by Tables 1A, and 1B, in an amount effective to prevent, diagnose, treat, or ameliorate the indicated disease or disorder.

[0607] In another embodiment, the present invention also encompasses methods of preventing, diagnosing, treating, or ameliorating a disease or disorder related to one, two, three, or more, of the cells, tissues, and organs where the polynucleotide and/or polypeptide is expressed (for example, as indicated in the “Tissue Distribution” column of Table 1B) or as indicated in the “Preferred Indications” column of Tables 1D, and 1E; comprising administering to a patient diagnostic or therapeutic molecules in combination with proteins, nucleic acids, or antibodies of the invention (or fragments or variants thereof) as represented by Tables 1A, and 1B.

[0608] The tissue distribution indicates that polynucleotides and polypeptides corresponding to this gene are useful for the treatment and/or detection of digestive tract disorders including Crohn's disease, intestinal bowel disease, ulcer, esophageal cancer, esophagitis, gastroesophageal reflux disease and Barrett esophagus, in addition to autoimmune diseases such as asthma, allergy and psoriasis.

[0609] Features of Protein Encoded by Gene No: 102

[0610] The translation product of this gene shares sequence homology with an orphan G-protein coupled receptor.

[0611] This gene is expressed primarily in esophageal cancer.

[0612] Polynucleotides and polypeptides of the invention are useful as reagents for differential identification of the tissue(s) or cell type(s) present in a biological sample and for diagnosis of diseases and conditions which include but are not limited to: esophageal cancer. Similarly, polypeptides and antibodies directed to these polypeptides are useful in providing immunological probes for differential identification of the tissue(s) or cell type(s). For a number of disorders of the above tissues or cells, particularly of the digestive tract, expression of this gene at significantly higher or lower levels may be routinely detected in certain tissues or cell types (e.g., cancerous and wounded tissues) or bodily fluids (e.g., serum, plasma, urine, synovial fluid and spinal fluid) or another tissue or sample taken from an individual having such a disorder, relative to the standard gene expression level, i.e., the expression level in healthy tissue or bodily fluid from an individual not having the disorder.

[0613] Embodiments of the invention encompass using polynucleotides and polypeptides (including fragments and variants thereof, and also antibodies, agonists, and antagonists thereof) to prevent, diagnose, treat, or ameliorate a disease or disorder. In preferred embodiments, the present invention encompasses a method of preventing, diagnosing, treating, or ameliorating a disease or disorder (for example, as indicated in the “Preferred Indications” column of Tables 1D, and 1E) related to one, two, three, or more, of the cells, tissues, and organs where the polynucleotide and/or polypeptide is expressed (for example, as indicated in the “Tissue Distribution” column of Table 1B); comprising administering to a patient in which such prevention, diagnosis, treatment, or amelioration is desired a protein, nucleic acid, or antibody of the invention (or fragment or variant thereof) represented by Tables 1A, and 1B, in an amount effective to prevent, diagnose, treat, or ameliorate the indicated disease or disorder.

[0614] In another embodiment, the present invention also encompasses methods of preventing, diagnosing, treating, or ameliorating a disease or disorder related to one, two, three, or more, of the cells, tissues, and organs where the polynucleotide and/or polypeptide is expressed (for example, as indicated in the “Tissue Distribution” column of Table 1B) or as indicated in the “Preferred Indications” column of Tables 1D, and 1E; comprising administering to a patient diagnostic or therapeutic molecules in combination with proteins, nucleic acids, or antibodies of the invention (or fragments or variants thereof) as represented by Tables 1A, and 1B.

[0615] The tissue distribution indicates that polynucleotides and polypeptides corresponding to this gene are useful for the treatment and/or detection of digestive tract disorders including Crohn's disease, intestinal bowel disease, ulcer, esophageal cancer, esophagitis, gastroesophageal reflux disease and Barrett esophagus.

[0616] Features of Protein Encoded by Gene No: 103

[0617] This gene is expressed primarily in malignant esophagus.

[0618] Polynucleotides and polypeptides of the invention are useful as reagents for differential identification of the tissue(s) or cell type(s) present in a biological sample and for diagnosis of diseases and conditions which include but are not limited to: esophageal cancer. Similarly, polypeptides and antibodies directed to these polypeptides are useful in providing immunological probes for differential identification of the tissue(s) or cell type(s). For a number of disorders of the above tissues or cells, particularly of the digestive tract, expression of this gene at significantly higher or lower levels may be routinely detected in certain tissues or cell types (e.g., cancerous and wounded tissues) or bodily fluids (e.g., serum, plasma, urine, synovial fluid and spinal fluid) or another tissue or sample taken from an individual having such a disorder, relative to the standard gene expression level, i.e., the expression level in healthy tissue or bodily fluid from an individual not having the disorder.

[0619] Embodiments of the invention encompass using polynucleotides and polypeptides (including fragments and variants thereof, and also antibodies, agonists, and antagonists thereof) to prevent, diagnose, treat, or ameliorate a disease or disorder. In preferred embodiments, the present invention encompasses a method of preventing, diagnosing, treating, or ameliorating a disease or disorder (for example, as indicated in the “Preferred Indications” column of Tables 1D, and 1E) related to one, two, three, or more, of the cells, tissues, and organs where the polynucleotide and/or polypeptide is expressed (for example, as indicated in the “Tissue Distribution” column of Table 1B); comprising administering to a patient in which such prevention, diagnosis, treatment, or amelioration is desired a protein, nucleic acid, or antibody of the invention (or fragment or variant thereof) represented by Tables 1A, and 1B, in an amount effective to prevent, diagnose, treat, or ameliorate the indicated disease or disorder.

[0620] In another embodiment, the present invention also encompasses methods of preventing, diagnosing, treating, or ameliorating a disease or disorder related to one, two, three, or more, of the cells, tissues, and organs where the polynucleotide and/or polypeptide is expressed (for example, as indicated in the “Tissue Distribution” column of Table 1B) or as indicated in the “Preferred Indications” column of Tables 1D, and 1E; comprising administering to a patient diagnostic or therapeutic molecules in combination with proteins, nucleic acids, or antibodies of the invention (or fragments or variants thereof) as represented by Tables 1A, and 1B.

[0621] The tissue distribution indicates that polynucleotides and polypeptides corresponding to this gene are useful for the treatment and/or detection of esophageal cancer, esophagitis, gastroesophageal reflux disease and Barrett esophagus.

[0622] Features of Protein Encoded by Gene No: 104

[0623] This gene is expressed primarily in esophageal cancer.

[0624] Polynucleotides and polypeptides of the invention are useful as reagents for differential identification of the tissue(s) or cell type(s) present in a biological sample and for diagnosis of diseases and conditions which include but are not limited to: esophageal cancer and other cancer types. Similarly, polypeptides and antibodies directed to these polypeptides are useful in providing immunological probes for differential identification of the tissue(s) or cell type(s). For a number of disorders of the above tissues or cells, particularly of the esophageal system, expression of this gene at significantly higher or lower levels may be routinely detected in certain tissues or cell types (e.g., cancerous and wounded tissues) or bodily fluids (e.g., serum, plasma, urine, synovial fluid and spinal fluid) or another tissue or sample taken from an individual having such a disorder, relative to the standard gene expression level, i.e., the expression level in healthy tissue or bodily fluid from an individual not having the disorder.

[0625] Embodiments of the invention encompass using polynucleotides and polypeptides (including fragments and variants thereof, and also antibodies, agonists, and antagonists thereof) to prevent, diagnose, treat, or ameliorate a disease or disorder. In preferred embodiments, the present invention encompasses a method of preventing, diagnosing, treating, or ameliorating a disease or disorder (for example, as indicated in the “Preferred Indications” column of Tables 1D, and 1E) related to one, two, three, or more, of the cells, tissues, and organs where the polynucleotide and/or polypeptide is expressed (for example, as indicated in the “Tissue Distribution” column of Table 1B); comprising administering to a patient in which such prevention, diagnosis, treatment, or amelioration is desired a protein, nucleic acid, or antibody of the invention (or fragment or variant thereof) represented by Tables 1A, and 1B, in an amount effective to prevent, diagnose, treat, or ameliorate the indicated disease or disorder.

[0626] In another embodiment, the present invention also encompasses methods of preventing, diagnosing, treating, or ameliorating a disease or disorder related to one, two, three, or more, of the cells, tissues, and organs where the polynucleotide and/or polypeptide is expressed (for example, as indicated in the “Tissue Distribution” column of Table 1B) or as indicated in the “Preferred Indications” column of Tables 1D, and 1E; comprising administering to a patient diagnostic or therapeutic molecules in combination with proteins, nucleic acids, or antibodies of the invention (or fragments or variants thereof) as represented by Tables 1A, and 1B.

[0627] The tissue distribution indicates that polynucleotides and polypeptides corresponding to this gene are useful for esophageal cancer and other form of cancer.

[0628] Features of Protein Encoded by Gene No: 105

[0629] This gene is expressed primarily in Fetal liver and spleen and placenta and to a lesser extent in dendritic cells, oligodendroma, total fetus, colon cancer, breast cancer, prostate cancer, germinal center B cells, activated T cells and pregnant uterus.

[0630] Polynucleotides and polypeptides of the invention are useful as reagents for differential identification of the tissue(s) or cell type(s) present in a biological sample and for diagnosis of diseases and conditions which include but are not limited to cancer. Similarly, polypeptides and antibodies directed to these polypeptides are useful in providing immunological probes for differential identification of the tissue(s) or cell type(s). For a number of disorders of the above tissues or cells, particularly of the gastrointestinal, female reproductive and immune systems, expression of this gene at significantly higher or lower levels may be routinely detected in certain tissues or cell types (e.g., cancerous and wounded tissues) or bodily fluids (e.g., serum, plasma, urine, synovial fluid and spinal fluid) or another tissue or sample taken from an individual having such a disorder, relative to the standard gene expression level, i.e., the expression level in healthy tissue or bodily fluid from an individual not having the disorder.

[0631] Embodiments of the invention encompass using polynucleotides and polypeptides (including fragments and variants thereof, and also antibodies, agonists, and antagonists thereof) to prevent, diagnose, treat, or ameliorate a disease or disorder. In preferred embodiments, the present invention encompasses a method of preventing, diagnosing, treating, or ameliorating a disease or disorder (for example, as indicated in the “Preferred Indications” column of Tables 1D, and 1E) related to one, two, three, or more, of the cells, tissues, and organs where the polynucleotide and/or polypeptide is expressed (for example, as indicated in the “Tissue Distribution” column of Table 1B); comprising administering to a patient in which such prevention, diagnosis, treatment, or amelioration is desired a protein, nucleic acid, or antibody of the invention (or fragment or variant thereof) represented by Tables 1A, and 1B, in an amount effective to prevent, diagnose, treat, or ameliorate the indicated disease or disorder.

[0632] In another embodiment, the present invention also encompasses methods of preventing, diagnosing, treating, or ameliorating a disease or disorder related to one, two, three, or more, of the cells, tissues, and organs where the polynucleotide and/or polypeptide is expressed (for example, as indicated in the “Tissue Distribution” column of Table 1B) or as indicated in the “Preferred Indications” column of Tables 1D, and 1E; comprising administering to a patient diagnostic or therapeutic molecules in combination with proteins, nucleic acids, or antibodies of the invention (or fragments or variants thereof) as represented by Tables 1A, and 1B.

[0633] The tissue distribution within numerous tumors and highly vascularized tissues such as placenta, fetal liver and pregnant uterus indicates that polynucleotides and polypeptides corresponding to this gene are useful for the diagnosis and treatment of cancers, particularly of the gastrointestinal tract, ovary, brain prostate and breast. Antibodies against the polypeptide may be especially useful to neutralize activities of this molecule, especially pro-angiogenic activities and may thus constitute an immunotherapy.

[0634] Features of Protein Encoded by Gene No: 106

[0635] This gene is expressed primarily in immune/hematopoietic, musculoskeletal, neural/sensory, and mixed fetal tissues.

[0636] Polynucleotides and polypeptides of the invention are useful as reagents for differential identification of the tissue(s) or cell type(s) present in a biological sample and for diagnosis of diseases and conditions which include but are not limited to disorders in immune/hematopoietic, musculoskeletal, and neural/sensory systems/organs. Similarly, polypeptides and antibodies directed to these polypeptides are useful in providing immunological probes for differential identification of the tissue(s) or cell type(s). For a number of disorders of the above tissues or cells, particularly of the immune/hematopoietic, musculoskeletal, and neural/sensory, expression of this gene at significantly higher or lower levels may be routinely detected in certain tissues or cell types (e.g., cancerous and wounded tissues) or bodily fluids (e.g., serum, plasma, urine, synovial fluid and spinal fluid) or another tissue or sample taken from an individual having such a disorder, relative to the standard gene expression level, i.e., the expression level in healthy tissue or bodily fluid from an individual not having the disorder.

[0637] Embodiments of the invention encompass using polynucleotides and polypeptides (including fragments and variants thereof, and also antibodies, agonists, and antagonists thereof) to prevent, diagnose, treat, or ameliorate a disease or disorder. In preferred embodiments, the present invention encompasses a method of preventing, diagnosing, treating, or ameliorating a disease or disorder (for example, as indicated in the “Preferred Indications” column of Tables 1D, and 1E) related to one, two, three, or more, of the cells, tissues, and organs where the polynucleotide and/or polypeptide is expressed (for example, as indicated in the “Tissue Distribution” column of Table 1B); comprising administering to a patient in which such prevention, diagnosis, treatment, or amelioration is desired a protein, nucleic acid, or antibody of the invention (or fragment or variant thereof) represented by Tables 1A, and 1B, in an amount effective to prevent, diagnose, treat, or ameliorate the indicated disease or disorder.

[0638] In another embodiment, the present invention also encompasses methods of preventing, diagnosing, treating, or ameliorating a disease or disorder related to one, two, three, or more, of the cells, tissues, and organs where the polynucleotide and/or polypeptide is expressed (for example, as indicated in the “Tissue Distribution” column of Table 1B) or as indicated in the “Preferred Indications” column of Tables 1D, and 1E; comprising administering to a patient diagnostic or therapeutic molecules in combination with proteins, nucleic acids, or antibodies of the invention (or fragments or variants thereof) as represented by Tables 1A, and 1B.

[0639] The tissue distribution indicates that polynucleotides and polypeptides corresponding to this gene are useful for treatment and diagnosis of disorders in immune/hematopoietic, musculoskeletal, neural/sensory, and mixed fetal systems/organs.

[0640] Features of Protein Encoded by Gene No: 107

[0641] This gene is expressed primarily in esophageal cancer.

[0642] Polynucleotides and polypeptides of the invention are useful as reagents for differential identification of the tissue(s) or cell type(s) present in a biological sample and for diagnosis of diseases and conditions which include but are not limited to: esophageal cancer. Similarly, polypeptides and antibodies directed to these polypeptides are useful in providing immunological probes for differential identification of the tissue(s) or cell type(s). For a number of disorders of the above tissues or cells, particularly of the digestive tract, expression of this gene at significantly higher or lower levels may be routinely detected in certain tissues or cell types (e.g., cancerous and wounded tissues) or bodily fluids (e.g., serum, plasma, urine, synovial fluid and spinal fluid) or another tissue or sample taken from an individual having such a disorder, relative to the standard gene expression level, i.e., the expression level in healthy tissue or bodily fluid from an individual not having the disorder.

[0643] Embodiments of the invention encompass using polynucleotides and polypeptides (including fragments and variants thereof, and also antibodies, agonists, and antagonists thereof) to prevent, diagnose, treat, or ameliorate a disease or disorder. In preferred embodiments, the present invention encompasses a method of preventing, diagnosing, treating, or ameliorating a disease or disorder (for example, as indicated in the “Preferred Indications” column of Tables 1D, and 1E) related to one, two, three, or more, of the cells, tissues, and organs where the polynucleotide and/or polypeptide is expressed (for example, as indicated in the “Tissue Distribution” column of Table 1B); comprising administering to a patient in which such prevention, diagnosis, treatment, or amelioration is desired a protein, nucleic acid, or antibody of the invention (or fragment or variant thereof) represented by Tables 1A, and 1B, in an amount effective to prevent, diagnose, treat, or ameliorate the indicated disease or disorder.

[0644] In another embodiment, the present invention also encompasses methods of preventing, diagnosing, treating, or ameliorating a disease or disorder related to one, two, three, or more, of the cells, tissues, and organs where the polynucleotide and/or polypeptide is expressed (for example, as indicated in the “Tissue Distribution” column of Table 1B) or as indicated in the “Preferred Indications” column of Tables 1D, and 1E; comprising administering to a patient diagnostic or therapeutic molecules in combination with proteins, nucleic acids, or antibodies of the invention (or fragments or variants thereof) as represented by Tables 1A, and 1B.

[0645] The tissue distribution indicates that polynucleotides and polypeptides corresponding to this gene are useful for the treatment and/or detection of esophageal cancer, esophagitis, gastroesophageal reflux disease and Barrett esophagus.

[0646] Features of Protein Encoded by Gene No: 108

[0647] The translation product of this gene shares sequence homology with bone marrow stromal cell surface protein which is thought to be important in hematopoiesis and immune disorders.

[0648] This gene is expressed primarily in esophageal cancer.

[0649] Polynucleotides and polypeptides of the invention are useful as reagents for differential identification of the tissue(s) or cell type(s) present in a biological sample and for diagnosis of diseases and conditions which include but are not limited to: esophageal cancer and immune disorders. Similarly, polypeptides and antibodies directed to these polypeptides are useful in providing immunological probes for differential identification of the tissue(s) or cell type(s). For a number of disorders of the above tissues or cells, particularly of the esophageal system, expression of this gene at significantly higher or lower levels may be routinely detected in certain tissues or cell types (e.g., cancerous and wounded tissues) or bodily fluids (e.g., serum, plasma, urine, synovial fluid and spinal fluid) or another tissue or sample taken from an individual having such a disorder, relative to the standard gene expression level, i.e., the expression level in healthy tissue or bodily fluid from an individual not having the disorder.

[0650] Embodiments of the invention encompass using polynucleotides and polypeptides (including fragments and variants thereof, and also antibodies, agonists, and antagonists thereof) to prevent, diagnose, treat, or ameliorate a disease or disorder. In preferred embodiments, the present invention encompasses a method of preventing, diagnosing, treating, or ameliorating a disease or disorder (for example, as indicated in the “Preferred Indications” column of Tables 1D, and 1E) related to one, two, three, or more, of the cells, tissues, and organs where the polynucleotide and/or polypeptide is expressed (for example, as indicated in the “Tissue Distribution” column of Table 1B); comprising administering to a patient in which such prevention, diagnosis, treatment, or amelioration is desired a protein, nucleic acid, or antibody of the invention (or fragment or variant thereof) represented by Tables 1A, and 1B, in an amount effective to prevent, diagnose, treat, or ameliorate the indicated disease or disorder.

[0651] In another embodiment, the present invention also encompasses methods of preventing, diagnosing, treating, or ameliorating a disease or disorder related to one, two, three, or more, of the cells, tissues, and organs where the polynucleotide and/or polypeptide is expressed (for example, as indicated in the “Tissue Distribution” column of Table 1B) or as indicated in the “Preferred Indications” column of Tables 1D, and 1E; comprising administering to a patient diagnostic or therapeutic molecules in combination with proteins, nucleic acids, or antibodies of the invention (or fragments or variants thereof) as represented by Tables 1A, and 1B.

[0652] The tissue distribution and homology to bone marrow stromal cell surface protein indicates that polynucleotides and polypeptides corresponding to this gene are useful for treatment and diagnosis of esophageal cancers, cancers and diseases of the immune system and bone marrow.

[0653] Features of Protein Encoded by Gene No: 109

[0654] The translation product of this gene shares sequence homology with a proteoglycan link protein.

[0655] This gene is expressed primarily in immune cell types, brain, breast and to a lesser extent in esophagus.

[0656] Polynucleotides and polypeptides of the invention are useful as reagents for differential identification of the tissue(s) or cell type(s) present in a biological sample and for diagnosis of diseases and conditions which include but are not limited to: immune and CNS disorders and esophageal cancer. Similarly, polypeptides and antibodies directed to these polypeptides are useful in providing immunological probes for differential identification of the tissue(s) or cell type(s). For a number of disorders of the above tissues or cells, particularly of the immune system the digestive tract and the central nervous system, expression of this gene at significantly higher or lower levels may be routinely detected in certain tissues or cell types (e.g., cancerous and wounded tissues) or bodily fluids (e.g., serum, plasma, urine, synovial fluid and spinal fluid) or another tissue or sample taken from an individual having such a disorder, relative to the standard gene expression level, i.e., the expression level in healthy tissue or bodily fluid from an individual not having the disorder.

[0657] Embodiments of the invention encompass using polynucleotides and polypeptides (including fragments and variants thereof, and also antibodies, agonists, and antagonists thereof) to prevent, diagnose, treat, or ameliorate a disease or disorder. In preferred embodiments, the present invention encompasses a method of preventing, diagnosing, treating, or ameliorating a disease or disorder (for example, as indicated in the “Preferred Indications” column of Tables 1D, and 1E) related to one, two, three, or more, of the cells, tissues, and organs where the polynucleotide and/or polypeptide is expressed (for example, as indicated in the “Tissue Distribution” column of Table 1B); comprising administering to a patient in which such prevention, diagnosis, treatment, or amelioration is desired a protein, nucleic acid, or antibody of the invention (or fragment or variant thereof) represented by Tables 1A, and 1B, in an amount effective to prevent, diagnose, treat, or ameliorate the indicated disease or disorder.

[0658] In another embodiment, the present invention also encompasses methods of preventing, diagnosing, treating, or ameliorating a disease or disorder related to one, two, three, or more, of the cells, tissues, and organs where the polynucleotide and/or polypeptide is expressed (for example, as indicated in the “Tissue Distribution” column of Table 1B) or as indicated in the “Preferred Indications” column of Tables 1D, and 1E; comprising administering to a patient diagnostic or therapeutic molecules in combination with proteins, nucleic acids, or antibodies of the invention (or fragments or variants thereof) as represented by Tables 1A, and 1B.

[0659] The tissue distribution indicates that polynucleotides and polypeptides corresponding to this gene are useful for the treatment of breast cancer, immune disorders, neurological and behavioral disorders and in addition esophageal cancer, esophagitis, gastroesophageal reflux disease and Barrett esophagus.

[0660] Features of Protein Encoded by Gene No: 110

[0661] The translation product of this gene shares sequence homology with MAC25 protein which is thought to be important in meningiomas.

[0662] This gene is expressed primarily in esophageal cancer.

[0663] Polynucleotides and polypeptides of the invention are useful as reagents for differential identification of the tissue(s) or cell type(s) present in a biological sample and for diagnosis of diseases and conditions which include but are not limited to: cancer and esophageal cancer and meningiomas. Similarly, polypeptides and antibodies directed to these polypeptides are useful in providing immunological probes for differential identification of the tissue(s) or cell type(s). For a number of disorders of the above tissues or cells, particularly of the esophageal system, expression of this gene at significantly higher or lower levels may be routinely detected in certain tissues or cell types (e.g., cancerous and wounded tissues) or bodily fluids (e.g., serum, plasma, urine, synovial fluid and spinal fluid) or another tissue or sample taken from an individual having such a disorder, relative to the standard gene expression level, i.e., the expression level in healthy tissue or bodily fluid from an individual not having the disorder.

[0664] Embodiments of the invention encompass using polynucleotides and polypeptides (including fragments and variants thereof, and also antibodies, agonists, and antagonists thereof) to prevent, diagnose, treat, or ameliorate a disease or disorder. In preferred embodiments, the present invention encompasses a method of preventing, diagnosing, treating, or ameliorating a disease or disorder (for example, as indicated in the “Preferred Indications” column of Tables 1D, and 1E) related to one, two, three, or more, of the cells, tissues, and organs where the polynucleotide and/or polypeptide is expressed (for example, as indicated in the “Tissue Distribution” column of Table 1B); comprising administering to a patient in which such prevention, diagnosis, treatment, or amelioration is desired a protein, nucleic acid, or antibody of the invention (or fragment or variant thereof) represented by Tables 1A, and 1B, in an amount effective to prevent, diagnose, treat, or ameliorate the indicated disease or disorder.

[0665] In another embodiment, the present invention also encompasses methods of preventing, diagnosing, treating, or ameliorating a disease or disorder related to one, two, three, or more, of the cells, tissues, and organs where the polynucleotide and/or polypeptide is expressed (for example, as indicated in the “Tissue Distribution” column of Table 1B) or as indicated in the “Preferred Indications” column of Tables 1D, and 1E; comprising administering to a patient diagnostic or therapeutic molecules in combination with proteins, nucleic acids, or antibodies of the invention (or fragments or variants thereof) as represented by Tables 1A, and 1B.

[0666] The tissue distribution and homology to MAC25 protein indicates that polynucleotides and polypeptides corresponding to this gene are useful for treatment and diagnosis of esophageal cancer and meningiomas.

[0667] Features of Protein Encoded by Gene No: 111

[0668] This gene is expressed primarily in temporal cortex-Alzheizmer (subtracted library), Soares fetal liver spleen 1NFLS, H. Meningioma (M1) and to a lesser extent in a variety of other cells and tissues.

[0669] Polynucleotides and polypeptides of the invention are useful as reagents for differential identification of the tissue(s) or cell type(s) present in a biological sample and for diagnosis of diseases and conditions which include but are not limited to: Alzheimer's disease and other neurodegenerative disorders, and cancer and other proliferative disorders, particularly of neural tissues. Similarly, polypeptides and antibodies directed to these polypeptides are useful in providing immunological probes for differential identification of the tissue(s) or cell type(s). For a number of disorders of the above tissues or cells, particularly of the nervous system, expression of this gene at significantly higher or lower levels may be routinely detected in certain tissues or cell types (e.g., cancerous and wounded tissues) or bodily fluids (e.g., serum, plasma, urine, synovial fluid and spinal fluid) or another tissue or sample taken from an individual having such a disorder, relative to the standard gene expression level, i.e., the expression level in healthy tissue or bodily fluid from an individual not having the disorder.

[0670] Embodiments of the invention encompass using polynucleotides and polypeptides (including fragments and variants thereof, and also antibodies, agonists, and antagonists thereof) to prevent, diagnose, treat, or ameliorate a disease or disorder. In preferred embodiments, the present invention encompasses a method of preventing, diagnosing, treating, or ameliorating a disease or disorder (for example, as indicated in the “Preferred Indications” column of Tables 1D, and 1E) related to one, two, three, or more, of the cells, tissues, and organs where the polynucleotide and/or polypeptide is expressed (for example, as indicated in the “Tissue Distribution” column of Table 1B); comprising administering to a patient in which such prevention, diagnosis, treatment, or amelioration is desired a protein, nucleic acid, or antibody of the invention (or fragment or variant thereof) represented by Tables 1A, and 1B, in an amount effective to prevent, diagnose, treat, or ameliorate the indicated disease or disorder.

[0671] In another embodiment, the present invention also encompasses methods of preventing, diagnosing, treating, or ameliorating a disease or disorder related to one, two, three, or more, of the cells, tissues, and organs where the polynucleotide and/or polypeptide is expressed (for example, as indicated in the “Tissue Distribution” column of Table 1B) or as indicated in the “Preferred Indications” column of Tables 1D, and 1E; comprising administering to a patient diagnostic or therapeutic molecules in combination with proteins, nucleic acids, or antibodies of the invention (or fragments or variants thereof) as represented by Tables 1A, and 1B.

[0672] The tissue distribution indicates that polynucleotides and polypeptides corresponding to this gene are useful for diagnosis and treatment of Alzheimer's disease and other neurodegenerative disorders, and diagnosis and treatment of cancer and other proliferative disorders, particularly of the nervous system.

[0673] Features of Protein Encoded by Gene No: 112

[0674] This gene is expressed primarily in normal esophagus, and esophageal cancer.

[0675] Polynucleotides and polypeptides of the invention are useful as reagents for differential identification of the tissue(s) or cell type(s) present in a biological sample and for diagnosis of diseases and conditions which include but are not limited to: esophageal disorders including esophageal cancer. Similarly, polypeptides and antibodies directed to these polypeptides are useful in providing immunological probes for differential identification of the tissue(s) or cell type(s). For a number of disorders of the above tissues or cells, particularly of the esophageal, expression of this gene at significantly higher or lower levels may be routinely detected in certain tissues or cell types (e.g., cancerous and wounded tissues) or bodily fluids (e.g., serum, plasma, urine, synovial fluid and spinal fluid) or another tissue or sample taken from an individual having such a disorder, relative to the standard gene expression level, i.e., the expression level in healthy tissue or bodily fluid from an individual not having the disorder.

[0676] Embodiments of the invention encompass using polynucleotides and polypeptides (including fragments and variants thereof, and also antibodies, agonists, and antagonists thereof) to prevent, diagnose, treat, or ameliorate a disease or disorder. In preferred embodiments, the present invention encompasses a method of preventing, diagnosing, treating, or ameliorating a disease or disorder (for example, as indicated in the “Preferred Indications” column of Tables 1D, and 1E) related to one, two, three, or more, of the cells, tissues, and organs where the polynucleotide and/or polypeptide is expressed (for example, as indicated in the “Tissue Distribution” column of Table 1B); comprising administering to a patient in which such prevention, diagnosis, treatment, or amelioration is desired a protein, nucleic acid, or antibody of the invention (or fragment or variant thereof) represented by Tables 1A, and 1B, in an amount effective to prevent, diagnose, treat, or ameliorate the indicated disease or disorder.

[0677] In another embodiment, the present invention also encompasses methods of preventing, diagnosing, treating, or ameliorating a disease or disorder related to one, two, three, or more, of the cells, tissues, and organs where the polynucleotide and/or polypeptide is expressed (for example, as indicated in the “Tissue Distribution” column of Table 1B) or as indicated in the “Preferred Indications” column of Tables 1D, and 1E; comprising administering to a patient diagnostic or therapeutic molecules in combination with proteins, nucleic acids, or antibodies of the invention (or fragments or variants thereof) as represented by Tables 1A, and 1B.

[0678] The tissue distribution indicates that polynucleotides and polypeptides corresponding to this gene are useful for treatment and diagnosis in esophageal disorders including esophageal cancer.

[0679] Features of Protein Encoded by Gene No: 113

[0680] This gene is expressed primarily in ovarian cancer and to a lesser extent in renal and pancreatic tumors.

[0681] Polynucleotides and polypeptides of the invention are useful as reagents for differential identification of the tissue(s) or cell type(s) present in a biological sample and for diagnosis of diseases and conditions which include but are not limited to ovarian, pancreatic, and kidney cancer. Similarly, polypeptides and antibodies directed to these polypeptides are useful in providing immunological probes for differential identification of the tissue(s) or cell type(s). For a number of disorders of the above tissues or cells, particularly of the reproductive, renal, and pancreatic systems, expression of this gene at significantly higher or lower levels may be routinely detected in certain tissues or cell types (e.g., cancerous and wounded tissues) or bodily fluids (e.g., serum, plasma, urine, synovial fluid and spinal fluid) or another tissue or sample taken from an individual having such a disorder, relative to the standard gene expression level, i.e., the expression level in healthy tissue or bodily fluid from an individual not having the disorder.

[0682] Embodiments of the invention encompass using polynucleotides and polypeptides (including fragments and variants thereof, and also antibodies, agonists, and antagonists thereof) to prevent, diagnose, treat, or ameliorate a disease or disorder. In preferred embodiments, the present invention encompasses a method of preventing, diagnosing, treating, or ameliorating a disease or disorder (for example, as indicated in the “Preferred Indications” column of Tables 1D, and 1E) related to one, two, three, or more, of the cells, tissues, and organs where the polynucleotide and/or polypeptide is expressed (for example, as indicated in the “Tissue Distribution” column of Table 1B); comprising administering to a patient in which such prevention, diagnosis, treatment, or amelioration is desired a protein, nucleic acid, or antibody of the invention (or fragment or variant thereof) represented by Tables 1A, and 1B, in an amount effective to prevent, diagnose, treat, or ameliorate the indicated disease or disorder.

[0683] In another embodiment, the present invention also encompasses methods of preventing, diagnosing, treating, or ameliorating a disease or disorder related to one, two, three, or more, of the cells, tissues, and organs where the polynucleotide and/or polypeptide is expressed (for example, as indicated in the “Tissue Distribution” column of Table 1B) or as indicated in the “Preferred Indications” column of Tables 1D, and 1E; comprising administering to a patient diagnostic or therapeutic molecules in combination with proteins, nucleic acids, or antibodies of the invention (or fragments or variants thereof) as represented by Tables 1A, and 1B.

[0684] The tissue distribution indicates that polynucleotides and polypeptides corresponding to this gene are useful for diagnosis and treatment of a number of solid neoplasms including tumors of the ovary, pancreas and kidney.

[0685] Features of Protein Encoded by Gene No: 114

[0686] This gene is expressed primarily in connective/epithelial, respiratory, and digestive tissues.

[0687] Polynucleotides and polypeptides of the invention are useful as reagents for differential identification of the tissue(s) or cell type(s) present in a biological sample and for diagnosis of diseases and conditions which include but are not limited to disorders in connective/epithelial, respiratory, and digestive systems/organs. Similarly, polypeptides and antibodies directed to these polypeptides are useful in providing immunological probes for differential identification of the tissue(s) or cell type(s). For a number of disorders of the above tissues or cells, particularly of the connective/epithelial, respiratory, and digestive, expression of this gene at significantly higher or lower levels may be routinely detected in certain tissues or cell types (e.g., cancerous and wounded tissues) or bodily fluids (e.g., serum, plasma, urine, synovial fluid and spinal fluid) or another tissue or sample taken from an individual having such a disorder, relative to the standard gene expression level, i.e., the expression level in healthy tissue or bodily fluid from an individual not having the disorder.

[0688] Embodiments of the invention encompass using polynucleotides and polypeptides (including fragments and variants thereof, and also antibodies, agonists, and antagonists thereof) to prevent, diagnose, treat, or ameliorate a disease or disorder. In preferred embodiments, the present invention encompasses a method of preventing, diagnosing, treating, or ameliorating a disease or disorder (for example, as indicated in the “Preferred Indications” column of Tables 1D, and 1E) related to one, two, three, or more, of the cells, tissues, and organs where the polynucleotide and/or polypeptide is expressed (for example, as indicated in the “Tissue Distribution” column of Table 1B); comprising administering to a patient in which such prevention, diagnosis, treatment, or amelioration is desired a protein, nucleic acid, or antibody of the invention (or fragment or variant thereof) represented by Tables 1A, and 1B, in an amount effective to prevent, diagnose, treat, or ameliorate the indicated disease or disorder.

[0689] In another embodiment, the present invention also encompasses methods of preventing, diagnosing, treating, or ameliorating a disease or disorder related to one, two, three, or more, of the cells, tissues, and organs where the polynucleotide and/or polypeptide is expressed (for example, as indicated in the “Tissue Distribution” column of Table 1B) or as indicated in the “Preferred Indications” column of Tables 1D, and 1E; comprising administering to a patient diagnostic or therapeutic molecules in combination with proteins, nucleic acids, or antibodies of the invention (or fragments or variants thereof) as represented by Tables 1A, and 1B.

[0690] The tissue distribution indicates that polynucleotides and polypeptides corresponding to this gene are useful for treatment and diagnosis of disorders in connective/epithelial, respiratory, and digestive systems/organs.

[0691] Features of Protein Encoded by Gene No: 115

[0692] This gene is expressed primarily in connective/epithelial, and digestive tissues, and to a lesser extent in musculoskeletal, immune/hematopoietic, and respiratory tissues.

[0693] Polynucleotides and polypeptides of the invention are useful as reagents for differential identification of the tissue(s) or cell type(s) present in a biological sample and for diagnosis of diseases and conditions which include but are not limited to disorders in connective/epithelial, digestive, musculoskeletal, immune/hematopoietic, and respiratory systems/organs. Similarly, polypeptides and antibodies directed to these polypeptides are useful in providing immunological probes for differential identification of the tissue(s) or cell type(s). For a number of disorders of the above tissues or cells, particularly of the connective/epithelial, digestive, musculoskeletal, immune/hematopoietic, and respiratory, expression of this gene at significantly higher or lower levels may be routinely detected in certain tissues or cell types (e.g., cancerous and wounded tissues) or bodily fluids (e.g., serum, plasma, urine, synovial fluid and spinal fluid) or another tissue or sample taken from an individual having such a disorder, relative to the standard gene expression level, i.e., the expression level in healthy tissue or bodily fluid from an individual not having the disorder.

[0694] Embodiments of the invention encompass using polynucleotides and polypeptides (including fragments and variants thereof, and also antibodies, agonists, and antagonists thereof) to prevent, diagnose, treat, or ameliorate a disease or disorder. In preferred embodiments, the present invention encompasses a method of preventing, diagnosing, treating, or ameliorating a disease or disorder (for example, as indicated in the “Preferred Indications” column of Tables 1D, and 1E) related to one, two, three, or more, of the cells, tissues, and organs where the polynucleotide and/or polypeptide is expressed (for example, as indicated in the “Tissue Distribution” column of Table 1B); comprising administering to a patient in which such prevention, diagnosis, treatment, or amelioration is desired a protein, nucleic acid, or antibody of the invention (or fragment or variant thereof) represented by Tables 1A, and 1B, in an amount effective to prevent, diagnose, treat, or ameliorate the indicated disease or disorder.

[0695] In another embodiment, the present invention also encompasses methods of preventing, diagnosing, treating, or ameliorating a disease or disorder related to one, two, three, or more, of the cells, tissues, and organs where the polynucleotide and/or polypeptide is expressed (for example, as indicated in the “Tissue Distribution” column of Table 1B) or as indicated in the “Preferred Indications” column of Tables 1D, and 1E; comprising administering to a patient diagnostic or therapeutic molecules in combination with proteins, nucleic acids, or antibodies of the invention (or fragments or variants thereof) as represented by Tables 1A, and 1B.

[0696] The tissue distribution indicates that polynucleotides and polypeptides corresponding to this gene are useful for treatment and diagnosis of disorders (e.g., cancer) in connective/epithelial, digestive, musculoskeletal, immune/hematopoietic, and respiratory systems/organs.

[0697] Features of Protein Encoded by Gene No: 116

[0698] This gene is expressed primarily in colon cancer and to a lesser extent in tumors of the kidney, lung, and esophagus.

[0699] Polynucleotides and polypeptides of the invention are useful as reagents for differential identification of the tissue(s) or cell type(s) present in a biological sample and for diagnosis of diseases and conditions which include but are not limited to colon cancer. Similarly, polypeptides and antibodies directed to these polypeptides are useful in providing immunological probes for differential identification of the tissue(s) or cell type(s). For a number of disorders of the above tissues or cells, particularly of the digestive system, expression of this gene at significantly higher or lower levels may be routinely detected in certain tissues or cell types (e.g., cancerous and wounded tissues) or bodily fluids (e.g., serum, plasma, urine, synovial fluid and spinal fluid) or another tissue or sample taken from an individual having such a disorder, relative to the standard gene expression level, i.e., the expression level in healthy tissue or bodily fluid from an individual not having the disorder.

[0700] Embodiments of the invention encompass using polynucleotides and polypeptides (including fragments and variants thereof, and also antibodies, agonists, and antagonists thereof) to prevent, diagnose, treat, or ameliorate a disease or disorder. In preferred embodiments, the present invention encompasses a method of preventing, diagnosing, treating, or ameliorating a disease or disorder (for example, as indicated in the “Preferred Indications” column of Tables 1D, and 1E) related to one, two, three, or more, of the cells, tissues, and organs where the polynucleotide and/or polypeptide is expressed (for example, as indicated in the “Tissue Distribution” column of Table 1B); comprising administering to a patient in which such prevention, diagnosis, treatment, or amelioration is desired a protein, nucleic acid, or antibody of the invention (or fragment or variant thereof) represented by Tables 1A, and 1B, in an amount effective to prevent, diagnose, treat, or ameliorate the indicated disease or disorder.

[0701] In another embodiment, the present invention also encompasses methods of preventing, diagnosing, treating, or ameliorating a disease or disorder related to one, two, three, or more, of the cells, tissues, and organs where the polynucleotide and/or polypeptide is expressed (for example, as indicated in the “Tissue Distribution” column of Table 1B) or as indicated in the “Preferred Indications” column of Tables 1D, and 1E; comprising administering to a patient diagnostic or therapeutic molecules in combination with proteins, nucleic acids, or antibodies of the invention (or fragments or variants thereof) as represented by Tables 1A, and 1B.

[0702] The tissue distribution indicates that polynucleotides and polypeptides corresponding to this gene are useful for in the treatment and diagnosis of tumor progression, in particular in the neoplasms of the colon, lung, kidney, and esophagus.

[0703] Features of Protein Encoded by Gene No: 117

[0704] This gene is expressed primarily in prostate cancer and to a lesser extent in neoplasms of the pancreas and esophagus.

[0705] Polynucleotides and polypeptides of the invention are useful as reagents for differential identification of the tissue(s) or cell type(s) present in a biological sample and for diagnosis of diseases and conditions which include but are not limited to prostate cancer. Similarly, polypeptides and antibodies directed to these polypeptides are useful in providing immunological probes for differential identification of the tissue(s) or cell type(s). For a number of disorders of the above tissues or cells, particularly of the reproductive system, expression of this gene at significantly higher or lower levels may be routinely detected in certain tissues or cell types (e.g., cancerous and wounded tissues) or bodily fluids (e.g., serum, plasma, urine, synovial fluid and spinal fluid) or another tissue or sample taken from an individual having such a disorder, relative to the standard gene expression level, i.e., the expression level in healthy tissue or bodily fluid from an individual not having the disorder.

[0706] Embodiments of the invention encompass using polynucleotides and polypeptides (including fragments and variants thereof, and also antibodies, agonists, and antagonists thereof) to prevent, diagnose, treat, or ameliorate a disease or disorder. In preferred embodiments, the present invention encompasses a method of preventing, diagnosing, treating, or ameliorating a disease or disorder (for example, as indicated in the “Preferred Indications” column of Tables 1D, and 1E) related to one, two, three, or more, of the cells, tissues, and organs where the polynucleotide and/or polypeptide is expressed (for example, as indicated in the “Tissue Distribution” column of Table 1B); comprising administering to a patient in which such prevention, diagnosis, treatment, or amelioration is desired a protein, nucleic acid, or antibody of the invention (or fragment or variant thereof) represented by Tables 1A, and 1B, in an amount effective to prevent, diagnose, treat, or ameliorate the indicated disease or disorder.

[0707] In another embodiment, the present invention also encompasses methods of preventing, diagnosing, treating, or ameliorating a disease or disorder related to one, two, three, or more, of the cells, tissues, and organs where the polynucleotide and/or polypeptide is expressed (for example, as indicated in the “Tissue Distribution” column of Table 1B) or as indicated in the “Preferred Indications” column of Tables 1D, and 1E; comprising administering to a patient diagnostic or therapeutic molecules in combination with proteins, nucleic acids, or antibodies of the invention (or fragments or variants thereof) as represented by Tables 1A, and 1B.

[0708] The tissue distribution indicates that polynucleotides and polypeptides corresponding to this gene are useful for in the treatment and diagnosis of a number of solid tumors including neoplasms of the pancreas, prostate, esophagus and lung.

[0709] Features of Protein Encoded by Gene No: 118

[0710] This gene is expressed primarily in colon tumor and to a lesser extent in neoplasms of the prostate and brain.

[0711] Polynucleotides and polypeptides of the invention are useful as reagents for differential identification of the tissue(s) or cell type(s) present in a biological sample and for diagnosis of diseases and conditions which include but are not limited to colon and prostate cancer. Similarly, polypeptides and antibodies directed to these polypeptides are useful in providing immunological probes for differential identification of the tissue(s) or cell type(s). For a number of disorders of the above tissues or cells, particularly of the gastrointestinal system (e.g. colon) and reproductive system (e.g. prostate), expression of this gene at significantly higher or lower levels may be routinely detected in certain tissues or cell types (e.g., cancerous and wounded tissues) or bodily fluids (e.g., serum, plasma, urine, synovial fluid and spinal fluid) or another tissue or sample taken from an individual having such a disorder, relative to the standard gene expression level, i.e., the expression level in healthy tissue or bodily fluid from an individual not having the disorder.

[0712] Embodiments of the invention encompass using polynucleotides and polypeptides (including fragments and variants thereof, and also antibodies, agonists, and antagonists thereof) to prevent, diagnose, treat, or ameliorate a disease or disorder. In preferred embodiments, the present invention encompasses a method of preventing, diagnosing, treating, or ameliorating a disease or disorder (for example, as indicated in the “Preferred Indications” column of Tables 1D, and 1E) related to one, two, three, or more, of the cells, tissues, and organs where the polynucleotide and/or polypeptide is expressed (for example, as indicated in the “Tissue Distribution” column of Table 1B); comprising administering to a patient in which such prevention, diagnosis, treatment, or amelioration is desired a protein, nucleic acid, or antibody of the invention (or fragment or variant thereof) represented by Tables 1A, and 1B, in an amount effective to prevent, diagnose, treat, or ameliorate the indicated disease or disorder.

[0713] In another embodiment, the present invention also encompasses methods of preventing, diagnosing, treating, or ameliorating a disease or disorder related to one, two, three, or more, of the cells, tissues, and organs where the polynucleotide and/or polypeptide is expressed (for example, as indicated in the “Tissue Distribution” column of Table 1B) or as indicated in the “Preferred Indications” column of Tables 1D, and 1E; comprising administering to a patient diagnostic or therapeutic molecules in combination with proteins, nucleic acids, or antibodies of the invention (or fragments or variants thereof) as represented by Tables 1A, and 1B.

[0714] The tissue distribution indicates that polynucleotides and polypeptides corresponding to this gene are useful for in the treatment or diagnosis of a number of solid tumors including neoplasms of the colon, prostate, and brain.

[0715] Features of Protein Encoded by Gene No: 119

[0716] This gene is expressed primarily in prostate cancer and adenocarcinomas.

[0717] Polynucleotides and polypeptides of the invention are useful as reagents for differential identification of the tissue(s) or cell type(s) present in a biological sample and for diagnosis of diseases and conditions which include but are not limited to: adenocarcinomas, prostate cancer and other types of cancer. Similarly, polypeptides and antibodies directed to these polypeptides are useful in providing immunological probes for differential identification of the tissue(s) or cell type(s). For a number of disorders of the above tissues or cells, particularly of prostate cancers and other cancers, expression of this gene at significantly higher or lower levels may be routinely detected in certain tissues or cell types (e.g., cancerous and wounded tissues) or bodily fluids (e.g., serum, plasma, urine, synovial fluid and spinal fluid) or another tissue or sample taken from an individual having such a disorder, relative to the standard gene expression level, i.e., the expression level in healthy tissue or bodily fluid from an individual not having the disorder.

[0718] Embodiments of the invention encompass using polynucleotides and polypeptides (including fragments and variants thereof, and also antibodies, agonists, and antagonists thereof) to prevent, diagnose, treat, or ameliorate a disease or disorder. In preferred embodiments, the present invention encompasses a method of preventing, diagnosing, treating, or ameliorating a disease or disorder (for example, as indicated in the “Preferred Indications” column of Tables 1D, and 1E) related to one, two, three, or more, of the cells, tissues, and organs where the polynucleotide and/or polypeptide is expressed (for example, as indicated in the “Tissue Distribution” column of Table 1B); comprising administering to a patient in which such prevention, diagnosis, treatment, or amelioration is desired a protein, nucleic acid, or antibody of the invention (or fragment or variant thereof) represented by Tables 1A, and 1B, in an amount effective to prevent, diagnose, treat, or ameliorate the indicated disease or disorder.

[0719] In another embodiment, the present invention also encompasses methods of preventing, diagnosing, treating, or ameliorating a disease or disorder related to one, two, three, or more, of the cells, tissues, and organs where the polynucleotide and/or polypeptide is expressed (for example, as indicated in the “Tissue Distribution” column of Table 1B) or as indicated in the “Preferred Indications” column of Tables 1D, and 1E; comprising administering to a patient diagnostic or therapeutic molecules in combination with proteins, nucleic acids, or antibodies of the invention (or fragments or variants thereof) as represented by Tables 1A, and 1B.

[0720] The tissue distribution indicates that polynucleotides and polypeptides corresponding to this gene are useful for diagnosis and treatment of prostate cancer, adenocarcinomas and other forms of cancer.

[0721] Features of Protein Encoded by Gene No: 120

[0722] This gene is expressed primarily in immune/hematopoietic, cardiovascular, and reproductive tissues.

[0723] Polynucleotides and polypeptides of the invention are useful as reagents for differential identification of the tissue(s) or cell type(s) present in a biological sample and for diagnosis of diseases and conditions which include but are not limited to disorders in immune/hematopoietic, cardiovascular, and reproductive systems/organs. Similarly, polypeptides and antibodies directed to these polypeptides are useful in providing immunological probes for differential identification of the tissue(s) or cell type(s). For a number of disorders of the above tissues or cells, particularly of the immune/hematopoietic, cardiovascular, and reproductive, expression of this gene at significantly higher or lower levels may be routinely detected in certain tissues or cell types (e.g., cancerous and wounded tissues) or bodily fluids (e.g., serum, plasma, urine, synovial fluid and spinal fluid) or another tissue or sample taken from an individual having such a disorder, relative to the standard gene expression level, i.e., the expression level in healthy tissue or bodily fluid from an individual not having the disorder.

[0724] Embodiments of the invention encompass using polynucleotides and polypeptides (including fragments and variants thereof, and also antibodies, agonists, and antagonists thereof) to prevent, diagnose, treat, or ameliorate a disease or disorder. In preferred embodiments, the present invention encompasses a method of preventing, diagnosing, treating, or ameliorating a disease or disorder (for example, as indicated in the “Preferred Indications” column of Tables 1D, and 1E) related to one, two, three, or more, of the cells, tissues, and organs where the polynucleotide and/or polypeptide is expressed (for example, as indicated in the “Tissue Distribution” column of Table 1B); comprising administering to a patient in which such prevention, diagnosis, treatment, or amelioration is desired a protein, nucleic acid, or antibody of the invention (or fragment or variant thereof) represented by Tables 1A, and 1B, in an amount effective to prevent, diagnose, treat, or ameliorate the indicated disease or disorder.

[0725] In another embodiment, the present invention also encompasses methods of preventing, diagnosing, treating, or ameliorating a disease or disorder related to one, two, three, or more, of the cells, tissues, and organs where the polynucleotide and/or polypeptide is expressed (for example, as indicated in the “Tissue Distribution” column of Table 1B) or as indicated in the “Preferred Indications” column of Tables 1D, and 1E; comprising administering to a patient diagnostic or therapeutic molecules in combination with proteins, nucleic acids, or antibodies of the invention (or fragments or variants thereof) as represented by Tables 1A, and 1B.

[0726] The tissue distribution indicates that polynucleotides and polypeptides corresponding to this gene are useful for treatment and diagnosis of disorders in immune/hematopoietic, cardiovascular, and reproductive systems/organs.

[0727] Features of Protein Encoded by Gene No: 121

[0728] This gene is expressed primarily in connective/epithelial, digestive, and respiratory tissues.

[0729] Polynucleotides and polypeptides of the invention are useful as reagents for differential identification of the tissue(s) or cell type(s) present in a biological sample and for diagnosis of diseases and conditions which include but are not limited to: disorders in connective/epithelial, digestive, and respiratory systems/organs. Similarly, polypeptides and antibodies directed to these polypeptides are useful in providing immunological probes for differential identification of the tissue(s) or cell type(s). For a number of disorders of the above tissues or cells, particularly of the connective/epithelial, digestive, and respiratory, expression of this gene at significantly higher or lower levels may be routinely detected in certain tissues or cell types (e.g., cancerous and wounded tissues) or bodily fluids (e.g., serum, plasma, urine, synovial fluid and spinal fluid) or another tissue or sample taken from an individual having such a disorder, relative to the standard gene expression level, i.e., the expression level in healthy tissue or bodily fluid from an individual not having the disorder.

[0730] Embodiments of the invention encompass using polynucleotides and polypeptides (including fragments and variants thereof, and also antibodies, agonists, and antagonists thereof) to prevent, diagnose, treat, or ameliorate a disease or disorder. In preferred embodiments, the present invention encompasses a method of preventing, diagnosing, treating, or ameliorating a disease or disorder (for example, as indicated in the “Preferred Indications” column of Tables 1D, and 1E) related to one, two, three, or more, of the cells, tissues, and organs where the polynucleotide and/or polypeptide is expressed (for example, as indicated in the “Tissue Distribution” column of Table 1B); comprising administering to a patient in which such prevention, diagnosis, treatment, or amelioration is desired a protein, nucleic acid, or antibody of the invention (or fragment or variant thereof) represented by Tables 1A, and 1B, in an amount effective to prevent, diagnose, treat, or ameliorate the indicated disease or disorder.

[0731] In another embodiment, the present invention also encompasses methods of preventing, diagnosing, treating, or ameliorating a disease or disorder related to one, two, three, or more, of the cells, tissues, and organs where the polynucleotide and/or polypeptide is expressed (for example, as indicated in the “Tissue Distribution” column of Table 1B) or as indicated in the “Preferred Indications” column of Tables 1D, and 1E; comprising administering to a patient diagnostic or therapeutic molecules in combination with proteins, nucleic acids, or antibodies of the invention (or fragments or variants thereof) as represented by Tables 1A, and 1B.

[0732] The tissue distribution indicates that polynucleotides and polypeptides corresponding to this gene are useful for treatment and diagnosis of disorders (e.g., cancer) in connective/epithelial, digestive, and respiratory systems/organs.

[0733] Features of Protein Encoded by Gene No: 122

[0734] This gene is expressed primarily in reproductive, neural/sensory, immune/hematopoietic, and to a lesser extent in cardiovascular, digestive, endocrine, connective/epithelial, and respiratory tissues.

[0735] Polynucleotides and polypeptides of the invention are useful as reagents for differential identification of the tissue(s) or cell type(s) present in a biological sample and for diagnosis of diseases and conditions which include but are not limited to disorders in reproductive, neural/sensory, immune/hematopoietic, cardiovascular, digestive, endocrine, connective/epithelial, and respiratory systems/organs. Similarly, polypeptides and antibodies directed to these polypeptides are useful in providing immunological probes for differential identification of the tissue(s) or cell type(s). For a number of disorders of the above tissues or cells, particularly of the reproductive, neural/sensory, immune/hematopoietic, cardiovascular, digestive, endocrine, connective/epithelial, and respiratory, expression of this gene at significantly higher or lower levels may be routinely detected in certain tissues or cell types (e.g., cancerous and wounded tissues) or bodily fluids (e.g., serum, plasma, urine, synovial fluid and spinal fluid) or another tissue or sample taken from an individual having such a disorder, relative to the standard gene expression level, i.e., the expression level in healthy tissue or bodily fluid from an individual not having the disorder.

[0736] Embodiments of the invention encompass using polynucleotides and polypeptides (including fragments and variants thereof, and also antibodies, agonists, and antagonists thereof) to prevent, diagnose, treat, or ameliorate a disease or disorder. In preferred embodiments, the present invention encompasses a method of preventing, diagnosing, treating, or ameliorating a disease or disorder (for example, as indicated in the “Preferred Indications” column of Tables 1D, and 1E) related to one, two, three, or more, of the cells, tissues, and organs where the polynucleotide and/or polypeptide is expressed (for example, as indicated in the “Tissue Distribution” column of Table 1B); comprising administering to a patient in which such prevention, diagnosis, treatment, or amelioration is desired a protein, nucleic acid, or antibody of the invention (or fragment or variant thereof) represented by Tables 1A, and 1B, in an amount effective to prevent, diagnose, treat, or ameliorate the indicated disease or disorder.

[0737] In another embodiment, the present invention also encompasses methods of preventing, diagnosing, treating, or ameliorating a disease or disorder related to one, two, three, or more, of the cells, tissues, and organs where the polynucleotide and/or polypeptide is expressed (for example, as indicated in the “Tissue Distribution” column of Table 1B) or as indicated in the “Preferred Indications” column of Tables 1D, and 1E; comprising administering to a patient diagnostic or therapeutic molecules in combination with proteins, nucleic acids, or antibodies of the invention (or fragments or variants thereof) as represented by Tables 1A, and 1B.

[0738] The tissue distribution indicates that polynucleotides and polypeptides corresponding to this gene are useful for treatment and diagnosis of disorders in reproductive, neural/sensory, immune/hematopoietic, cardiovascular, digestive, endocrine, connective/epithelial, and respiratory systems/organs.

[0739] Features of Protein Encoded by Gene No: 123

[0740] This gene is expressed primarily in reproductive and immune/hematopoietic cells and to a lesser extent in digestive, muscle, and neuronal cells.

[0741] Polynucleotides and polypeptides of the invention are useful as reagents for differential identification of the tissue(s) or cell type(s) present in a biological sample and for diagnosis of diseases and conditions which include but are not limited to: prostate and other reproductive organs, immune/hematopoietic system. Similarly, polypeptides and antibodies directed to these polypeptides are useful in providing immunological probes for differential identification of the tissue(s) or cell type(s). For a number of disorders of the above tissues or cells, particularly of the prostate and immune cells, expression of this gene at significantly higher or lower levels may be routinely detected in certain tissues or cell types (e.g., cancerous and wounded tissues) or bodily fluids (e.g., serum, plasma, urine, synovial fluid and spinal fluid) or another tissue or sample taken from an individual having such a disorder, relative to the standard gene expression level, i.e., the expression level in healthy tissue or bodily fluid from an individual not having the disorder.

[0742] Embodiments of the invention encompass using polynucleotides and polypeptides (including fragments and variants thereof, and also antibodies, agonists, and antagonists thereof) to prevent, diagnose, treat, or ameliorate a disease or disorder. In preferred embodiments, the present invention encompasses a method of preventing, diagnosing, treating, or ameliorating a disease or disorder (for example, as indicated in the “Preferred Indications” column of Tables 1D, and 1E) related to one, two, three, or more, of the cells, tissues, and organs where the polynucleotide and/or polypeptide is expressed (for example, as indicated in the “Tissue Distribution” column of Table 1B); comprising administering to a patient in which such prevention, diagnosis, treatment, or amelioration is desired a protein, nucleic acid, or antibody of the invention (or fragment or variant thereof) represented by Tables 1A, and 1B, in an amount effective to prevent, diagnose, treat, or ameliorate the indicated disease or disorder.

[0743] In another embodiment, the present invention also encompasses methods of preventing, diagnosing, treating, or ameliorating a disease or disorder related to one, two, three, or more, of the cells, tissues, and organs where the polynucleotide and/or polypeptide is expressed (for example, as indicated in the “Tissue Distribution” column of Table 1B) or as indicated in the “Preferred Indications” column of Tables 1D, and 1E; comprising administering to a patient diagnostic or therapeutic molecules in combination with proteins, nucleic acids, or antibodies of the invention (or fragments or variants thereof) as represented by Tables 1A, and 1B.

[0744] Features of Protein Encoded by Gene No: 124

[0745] This gene is expressed primarily in cancerous tissues of the parathyroid, esophagus, pancreas and adrenal gland; osteoarthritis; and fetal brain.

[0746] Polynucleotides and polypeptides of the invention are useful as reagents for differential identification of the tissue(s) or cell type(s) present in a biological sample and for diagnosis of diseases and conditions which include but are not limited to: disorders of the parathyroid, esophagus, pancreas and adrenal gland (e.g., cancer); osteoarthritis; and fetal brain. Similarly, polypeptides and antibodies directed to these polypeptides are useful in providing immunological probes for differential identification of the tissue(s) or cell type(s). For a number of disorders of the above tissues or cells, particularly of the musculoskeletal, Immune/hematopoietic, cardiovascular, endocrine, reproductive, and neural/sensory, expression of this gene at significantly higher or lower levels may be routinely detected in certain tissues or cell types (e.g., cancerous and wounded tissues) or bodily fluids (e.g., serum, plasma, urine, synovial fluid and spinal fluid) or another tissue or sample taken from an individual having such a disorder, relative to the standard gene expression level, i.e., the expression level in healthy tissue or bodily fluid from an individual not having the disorder.

[0747] Embodiments of the invention encompass using polynucleotides and polypeptides (including fragments and variants thereof, and also antibodies, agonists, and antagonists thereof) to prevent, diagnose, treat, or ameliorate a disease or disorder. In preferred embodiments, the present invention encompasses a method of preventing, diagnosing, treating, or ameliorating a disease or disorder (for example, as indicated in the “Preferred Indications” column of Tables 1D, and 1E) related to one, two, three, or more, of the cells, tissues, and organs where the polynucleotide and/or polypeptide is expressed (for example, as indicated in the “Tissue Distribution” column of Table 1B); comprising administering to a patient in which such prevention, diagnosis, treatment, or amelioration is desired a protein, nucleic acid, or antibody of the invention (or fragment or variant thereof) represented by Tables 1A, and 1B, in an amount effective to prevent, diagnose, treat, or ameliorate the indicated disease or disorder.

[0748] In another embodiment, the present invention also encompasses methods of preventing, diagnosing, treating, or ameliorating a disease or disorder related to one, two, three, or more, of the cells, tissues, and organs where the polynucleotide and/or polypeptide is expressed (for example, as indicated in the “Tissue Distribution” column of Table 1B) or as indicated in the “Preferred Indications” column of Tables 1D, and 1E; comprising administering to a patient diagnostic or therapeutic molecules in combination with proteins, nucleic acids, or antibodies of the invention (or fragments or variants thereof) as represented by Tables 1A, and 1B.

[0749] The tissue distribution indicates that polynucleotides and polypeptides corresponding to this gene are useful for treatment and diagnosis of disorders in musculoskeletal, Immune/hematopoietic, cardiovascular, endocrine, reproductive, and neural/sensory systems/organs such as, for example, disorders of the parathyroid, esophagus, pancreas, brain, and adrenal gland (e.g., cancer); and osteoarthritis.

[0750] Features of Protein Encoded by Gene No: 125

[0751] This gene is expressed primarily in Mo7e Cell Line GM-CSF treated (1 ng/ml), stomach tumor, and Soares Placenta Nb2H, and to a lesser extent in a variety of other cells, cell lines, and tissues.

[0752] Polynucleotides and polypeptides of the invention are useful as reagents for differential identification of the tissue(s) or cell type(s) present in a biological sample and for diagnosis of diseases and conditions which include but are not limited to: cancer and other proliferative disorders. Similarly, polypeptides and antibodies directed to these polypeptides are useful in providing immunological probes for differential identification of the tissue(s) or cell type(s). For a number of disorders of the above tissues or cells, particularly of the immune system, expression of this gene at significantly higher or lower levels may be routinely detected in certain tissues or cell types (e.g., cancerous and wounded tissues) or bodily fluids (e.g., serum, plasma, urine, synovial fluid and spinal fluid) or another tissue or sample taken from an individual having such a disorder, relative to the standard gene expression level, i.e., the expression level in healthy tissue or bodily fluid from an individual not having the disorder. Supernatants from cells transiently transfected with this gene have been shown to induce IL-10 production in Human T-cell 2B9 cell lines, suggesting a role in control of proliferation/differentiation.

[0753] Embodiments of the invention encompass using polynucleotides and polypeptides (including fragments and variants thereof, and also antibodies, agonists, and antagonists thereof) to prevent, diagnose, treat, or ameliorate a disease or disorder. In preferred embodiments, the present invention encompasses a method of preventing, diagnosing, treating, or ameliorating a disease or disorder (for example, as indicated in the “Preferred Indications” column of Tables 1D, and 1E) related to one, two, three, or more, of the cells, tissues, and organs where the polynucleotide and/or polypeptide is expressed (for example, as indicated in the “Tissue Distribution” column of Table 1B); comprising administering to a patient in which such prevention, diagnosis, treatment, or amelioration is desired a protein, nucleic acid, or antibody of the invention (or fragment or variant thereof) represented by Tables 1A, and 1B, in an amount effective to prevent, diagnose, treat, or ameliorate the indicated disease or disorder.

[0754] In another embodiment, the present invention also encompasses methods of preventing, diagnosing, treating, or ameliorating a disease or disorder related to one, two, three, or more, of the cells, tissues, and organs where the polynucleotide and/or polypeptide is expressed (for example, as indicated in the “Tissue Distribution” column of Table 1B) or as indicated in the “Preferred Indications” column of Tables 1D, and 1E; comprising administering to a patient diagnostic or therapeutic molecules in combination with proteins, nucleic acids, or antibodies of the invention (or fragments or variants thereof) as represented by Tables 1A, and 1B.

[0755] The tissue distribution and IL-10 induction capability indicates that polynucleotides and polypeptides corresponding to this gene are useful for diagnosis and treatment of cancer and other proliferative disorders.

[0756] Features of Protein Encoded by Gene No: 126

[0757] This gene is expressed primarily in reproductive, immune/hematopoietic, neural/sensory tissues and to a lesser extent in musculoskeletal, respiratory, mixed fetal, cardiovascular, and digestive tissues.

[0758] Polynucleotides and polypeptides of the invention are useful as reagents for differential identification of the tissue(s) or cell type(s) present in a biological sample and for diagnosis of diseases and conditions which include but are not limited to: disorders in reproductive, immune/hematopoietic, neural/sensory, musculoskeletal, respiratory, mixed fetal, cardiovascular, and digestive systems/organs. Similarly, polypeptides and antibodies directed to these polypeptides are useful in providing immunological probes for differential identification of the tissue(s) or cell type(s). For a number of disorders of the above tissues or cells, particularly of the reproductive, immune/hematopoietic, neural/sensory, musculoskeletal, respiratory, mixed fetal, cardiovascular, and digestive, expression of this gene at significantly higher or lower levels may be routinely detected in certain tissues or cell types (e.g., cancerous and wounded tissues) or bodily fluids (e.g., serum, plasma, urine, synovial fluid and spinal fluid) or another tissue or sample taken from an individual having such a disorder, relative to the standard gene expression level, i.e., the expression level in healthy tissue or bodily fluid from an individual not having the disorder.

[0759] Embodiments of the invention encompass using polynucleotides and polypeptides (including fragments and variants thereof, and also antibodies, agonists, and antagonists thereof) to prevent, diagnose, treat, or ameliorate a disease or disorder. In preferred embodiments, the present invention encompasses a method of preventing, diagnosing, treating, or ameliorating a disease or disorder (for example, as indicated in the “Preferred Indications” column of Tables 1D, and 1E) related to one, two, three, or more, of the cells, tissues, and organs where the polynucleotide and/or polypeptide is expressed (for example, as indicated in the “Tissue Distribution” column of Table 1B); comprising administering to a patient in which such prevention, diagnosis, treatment, or amelioration is desired a protein, nucleic acid, or antibody of the invention (or fragment or variant thereof) represented by Tables 1A, and 1B, in an amount effective to prevent, diagnose, treat, or ameliorate the indicated disease or disorder.

[0760] In another embodiment, the present invention also encompasses methods of preventing, diagnosing, treating, or ameliorating a disease or disorder related to one, two, three, or more, of the cells, tissues, and organs where the polynucleotide and/or polypeptide is expressed (for example, as indicated in the “Tissue Distribution” column of Table 1B) or as indicated in the “Preferred Indications” column of Tables 1D, and 1E; comprising administering to a patient diagnostic or therapeutic molecules in combination with proteins, nucleic acids, or antibodies of the invention (or fragments or variants thereof) as represented by Tables 1A, and 1B.

[0761] The tissue distribution indicates that polynucleotides and polypeptides corresponding to this gene are useful for treatment and diagnosis of disorders in reproductive, immune/hematopoietic, neural/sensory, musculoskeletal, respiratory, mixed fetal, cardiovascular, and digestive systems/organs.

[0762] Features of Protein Encoded by Gene No: 127

[0763] The translation product of this gene shares sequence homology with Long-chain-fatty-acid-CoA ligase 2.

[0764] This gene is expressed primarily in immune and digestive tissues.

[0765] Polynucleotides and polypeptides of the invention are useful as reagents for differential identification of the tissue(s) or cell type(s) present in a biological sample and for diagnosis of diseases and conditions which include but are not limited to: immune disorders including asthma and allergies, autoimmune diseases, cancer, Crohn's diseases, ulcers, esophageal cancer, esophagitis, GERD, disorders of the GI tract, and diabetes. Similarly, polypeptides and antibodies directed to these polypeptides are useful in providing immunological probes for differential identification of the tissue(s) or cell type(s). For a number of disorders of the above tissues or cells, particularly of the immune and digestive system, expression of this gene at significantly higher or lower levels may be routinely detected in certain tissues or cell types (e.g., cancerous and wounded tissues) or bodily fluids (e.g., serum, plasma, urine, synovial fluid and spinal fluid) or another tissue or sample taken from an individual having such a disorder, relative to the standard gene expression level, i.e., the expression level in healthy tissue or bodily fluid from an individual not having the disorder.

[0766] Embodiments of the invention encompass using polynucleotides and polypeptides (including fragments and variants thereof, and also antibodies, agonists, and antagonists thereof) to prevent, diagnose, treat, or ameliorate a disease or disorder. In preferred embodiments, the present invention encompasses a method of preventing, diagnosing, treating, or ameliorating a disease or disorder (for example, as indicated in the “Preferred Indications” column of Tables 1D, and 1E) related to one, two, three, or more, of the cells, tissues, and organs where the polynucleotide and/or polypeptide is expressed (for example, as indicated in the “Tissue Distribution” column of Table 1B); comprising administering to a patient in which such prevention, diagnosis, treatment, or amelioration is desired a protein, nucleic acid, or antibody of the invention (or fragment or variant thereof) represented by Tables 1A, and 1B, in an amount effective to prevent, diagnose, treat, or ameliorate the indicated disease or disorder.

[0767] In another embodiment, the present invention also encompasses methods of preventing, diagnosing, treating, or ameliorating a disease or disorder related to one, two, three, or more, of the cells, tissues, and organs where the polynucleotide and/or polypeptide is expressed (for example, as indicated in the “Tissue Distribution” column of Table 1B) or as indicated in the “Preferred Indications” column of Tables 1D, and 1E; comprising administering to a patient diagnostic or therapeutic molecules in combination with proteins, nucleic acids, or antibodies of the invention (or fragments or variants thereof) as represented by Tables 1A, and 1B.

[0768] Polynucleotides and polypeptides corresponding to this gene are useful for immune disorders including asthma and allergies, autoimmune diseases, cancer, Crohn's diseases, ulcers, esophageal cancer, esophagitis, GERD, disorders of the GI tract, diabetes.

[0769] Features of Protein Encoded by Gene No: 128

[0770] This gene is expressed primarily in immune/hematopoietic, reproductive, and digestive tissues (e.g., cancerous rectum and colon), and to a lesser extent in endocrine, musculoskeletal, neural/sensory, respiratory, connective/epithelial, and cardiovascular tissues.

[0771] Polynucleotides and polypeptides of the invention are useful as reagents for differential identification of the tissue(s) or cell type(s) present in a biological sample and for diagnosis of diseases and conditions which include but are not limited to: disorders in immune/hematopoietic, reproductive, digestive, endocrine, musculoskeletal, neural/sensory, respiratory, connective/epithelial, and cardiovascular systems/organs. Similarly, polypeptides and antibodies directed to these polypeptides are useful in providing immunological probes for differential identification of the tissue(s) or cell type(s). For a number of disorders of the above tissues or cells, particularly of the immune/hematopoietic, reproductive, digestive, endocrine, musculoskeletal, neural/sensory, respiratory, connective/epithelial, and cardiovascular, expression of this gene at significantly higher or lower levels may be routinely detected in certain tissues or cell types (e.g., cancerous and wounded tissues) or bodily fluids (e.g., serum, plasma, urine, synovial fluid and spinal fluid) or another tissue or sample taken from an individual having such a disorder, relative to the standard gene expression level, i.e., the expression level in healthy tissue or bodily fluid from an individual not having the disorder.

[0772] Embodiments of the invention encompass using polynucleotides and polypeptides (including fragments and variants thereof, and also antibodies, agonists, and antagonists thereof) to prevent, diagnose, treat, or ameliorate a disease or disorder. In preferred embodiments, the present invention encompasses a method of preventing, diagnosing, treating, or ameliorating a disease or disorder (for example, as indicated in the “Preferred Indications” column of Tables 1D, and 1E) related to one, two, three, or more, of the cells, tissues, and organs where the polynucleotide and/or polypeptide is expressed (for example, as indicated in the “Tissue Distribution” column of Table 1B); comprising administering to a patient in which such prevention, diagnosis, treatment, or amelioration is desired a protein, nucleic acid, or antibody of the invention (or fragment or variant thereof) represented by Tables 1A, and 1B, in an amount effective to prevent, diagnose, treat, or ameliorate the indicated disease or disorder.

[0773] In another embodiment, the present invention also encompasses methods of preventing, diagnosing, treating, or ameliorating a disease or disorder related to one, two, three, or more, of the cells, tissues, and organs where the polynucleotide and/or polypeptide is expressed (for example, as indicated in the “Tissue Distribution” column of Table 1B) or as indicated in the “Preferred Indications” column of Tables 1D, and 1E; comprising administering to a patient diagnostic or therapeutic molecules in combination with proteins, nucleic acids, or antibodies of the invention (or fragments or variants thereof) as represented by Tables 1A, and 1B.

[0774] The tissue distribution indicates that polynucleotides and polypeptides corresponding to this gene are useful for treatment and diagnosis of disorders (e.g., cancer) in immune/hematopoietic, reproductive, digestive (e.g., rectal and/or colon cancer), endocrine, musculoskeletal, neural/sensory, respiratory, connective/epithelial, and cardiovascular systems/organs.

[0775] Features of Protein Encoded by Gene No: 129

[0776] The translation product of this gene shares sequence homology with human pHL E1F1 gene product; a proline rich protein expressed in the lacrimal gland.

[0777] This gene is expressed primarily in cancer cells, especially Esophageal cancer #2109A5A ductal carcinoma and to a lesser extent in HT0885, and NCI_CGAP_Co18 (a colon adenocarcinoma).

[0778] Polynucleotides and polypeptides of the invention are useful as reagents for differential identification of the tissue(s) or cell type(s) present in a biological sample and for diagnosis of diseases and conditions which include but are not limited to cancer, especially of epithelial tissues such as the esophagus and colon. Similarly, polypeptides and antibodies directed to these polypeptides are useful in providing immunological probes for differential identification of the tissue(s) or cell type(s). For a number of disorders of the above tissues or cells, particularly of the epithelium, expression of this gene at significantly higher or lower levels may be routinely detected in certain tissues or cell types (e.g., cancerous and wounded tissues) or bodily fluids (e.g., serum, plasma, urine, synovial fluid and spinal fluid) or another tissue or sample taken from an individual having such a disorder, relative to the standard gene expression level, i.e., the expression level in healthy tissue or bodily fluid from an individual not having the disorder.

[0779] Embodiments of the invention encompass using polynucleotides and polypeptides (including fragments and variants thereof, and also antibodies, agonists, and antagonists thereof) to prevent, diagnose, treat, or ameliorate a disease or disorder. In preferred embodiments, the present invention encompasses a method of preventing, diagnosing, treating, or ameliorating a disease or disorder (for example, as indicated in the “Preferred Indications” column of Tables 1D, and 1E) related to one, two, three, or more, of the cells, tissues, and organs where the polynucleotide and/or polypeptide is expressed (for example, as indicated in the “Tissue Distribution” column of Table 1B); comprising administering to a patient in which such prevention, diagnosis, treatment, or amelioration is desired a protein, nucleic acid, or antibody of the invention (or fragment or variant thereof) represented by Tables 1A, and 1B, in an amount effective to prevent, diagnose, treat, or ameliorate the indicated disease or disorder.

[0780] In another embodiment, the present invention also encompasses methods of preventing, diagnosing, treating, or ameliorating a disease or disorder related to one, two, three, or more, of the cells, tissues, and organs where the polynucleotide and/or polypeptide is expressed (for example, as indicated in the “Tissue Distribution” column of Table 1B) or as indicated in the “Preferred Indications” column of Tables 1D, and 1E; comprising administering to a patient diagnostic or therapeutic molecules in combination with proteins, nucleic acids, or antibodies of the invention (or fragments or variants thereof) as represented by Tables 1A, and 1B.

[0781] The tissue distribution indicates that polynucleotides and polypeptides corresponding to this gene are useful for diagnosis and treatment of cancer and other proliferative disorders, especially of the epithelium. Preferred indications are diagnosis and treatment of cancer of the esophagus and colon.

[0782] Features of Protein Encoded by Gene No: 130

[0783] This gene is expressed primarily in Esophageal Cancer tissue and to a lesser extent in kidney and connective tissue (e.g., skin).

[0784] Polynucleotides and polypeptides of the invention are useful as reagents for differential identification of the tissue(s) or cell type(s) present in a biological sample and for diagnosis of diseases and conditions which include but are not limited to: disorders of the digestive system, e.g., esophageal cancer. Similarly, polypeptides and antibodies directed to these polypeptides are useful in providing immunological probes for differential identification of the tissue(s) or cell type(s). For a number of disorders of the above tissues or cells, particularly of the immune/hematopoietic, neural/sensory, reproductive, and embryonic, expression of this gene at significantly higher or lower levels may be routinely detected in certain tissues or cell types (e.g., cancerous and wounded tissues) or bodily fluids (e.g., serum, plasma, urine, synovial fluid and spinal fluid) or another tissue or sample taken from an individual having such a disorder, relative to the standard gene expression level, i.e., the expression level in healthy tissue or bodily fluid from an individual not having the disorder.

[0785] Embodiments of the invention encompass using polynucleotides and polypeptides (including fragments and variants thereof, and also antibodies, agonists, and antagonists thereof) to prevent, diagnose, treat, or ameliorate a disease or disorder. In preferred embodiments, the present invention encompasses a method of preventing, diagnosing, treating, or ameliorating a disease or disorder (for example, as indicated in the “Preferred Indications” column of Tables 1D, and 1E) related to one, two, three, or more, of the cells, tissues, and organs where the polynucleotide and/or polypeptide is expressed (for example, as indicated in the “Tissue Distribution” column of Table 1B); comprising administering to a patient in which such prevention, diagnosis, treatment, or amelioration is desired a protein, nucleic acid, or antibody of the invention (or fragment or variant thereof) represented by Tables 1A, and 1B, in an amount effective to prevent, diagnose, treat, or ameliorate the indicated disease or disorder.

[0786] In another embodiment, the present invention also encompasses methods of preventing, diagnosing, treating, or ameliorating a disease or disorder related to one, two, three, or more, of the cells, tissues, and organs where the polynucleotide and/or polypeptide is expressed (for example, as indicated in the “Tissue Distribution” column of Table 1B) or as indicated in the “Preferred Indications” column of Tables 1D, and 1E; comprising administering to a patient diagnostic or therapeutic molecules in combination with proteins, nucleic acids, or antibodies of the invention (or fragments or variants thereof) as represented by Tables 1A, and 1B.

[0787] The tissue distribution and homology to seven transmembrane proteins indicates that polynucleotides and polypeptides corresponding to this gene are useful for treatment and diagnosis of disorders of the kidney, esophagus (e.g., esophageal cancer) and/or connective tissue disorders (e.g., skin cancer). Polynucleotides and polypeptides corresponding to this gene are also useful for developing drugs for diseases of the kidney connective tissue, and/or esophagus (e.g., esophageal cancer).

[0788] Features of Protein Encoded by Gene No: 131

[0789] The translation product of this gene shares sequence homology with alternative splicing factor ASF-2.

[0790] This gene is expressed primarily in cancerous tissues of the ovary, brain, pancreas, lung, and immune cells (e.g., B cell).

[0791] Polynucleotides and polypeptides of the invention are useful as reagents for differential identification of the tissue(s) or cell type(s) present in a biological sample and for diagnosis of diseases and conditions which include but are not limited to: cancer of the ovary, brain, pancreas, lung, and immune cells (e.g., B cell). Similarly, polypeptides and antibodies directed to these polypeptides are useful in providing immunological probes for differential identification of the tissue(s) or cell type(s). For a number of disorders of the above tissues or cells, particularly of the immune, respiratory, reproductive, and neural systems, expression of this gene at significantly higher or lower levels may be routinely detected in certain tissues or cell types (e.g., cancerous and wounded tissues) or bodily fluids (e.g., serum, plasma, urine, synovial fluid and spinal fluid) or another tissue or sample taken from an individual having such a disorder, relative to the standard gene expression level, i.e., the expression level in healthy tissue or bodily fluid from an individual not having the disorder.

[0792] Embodiments of the invention encompass using polynucleotides and polypeptides (including fragments and variants thereof, and also antibodies, agonists, and antagonists thereof) to prevent, diagnose, treat, or ameliorate a disease or disorder. In preferred embodiments, the present invention encompasses a method of preventing, diagnosing, treating, or ameliorating a disease or disorder (for example, as indicated in the “Preferred Indications” column of Table 1D, and 1E) related to one, two, three, or more, of the cells, tissues, and organs where the polynucleotide and/or polypeptide is expressed (for example, as indicated in the “Tissue Distribution” column of Table 1B); comprising administering to a patient in which such prevention, diagnosis, treatment, or amelioration is desired a protein, nucleic acid, or antibody of the invention (or fragment or variant thereof) represented by Tables 1A, and 1B in an amount effective to prevent, diagnose, treat, or ameliorate the indicated disease or disorder.

[0793] In another embodiment, the present invention also encompasses methods of preventing, diagnosing, treating, or ameliorating a disease or disorder related to one, two, three, or more, of the cells, tissues, and organs where the polynucleotide and/or polypeptide is expressed (for example, as indicated in the “Tissue Distribution” column of Table 1B) or as indicated in the “Preferred Indications” column of Tables 1D, and 1E; comprising administering to a patient diagnostic or therapeutic molecules in combination with proteins, nucleic acids, or antibodies of the invention (or fragments or variants thereof) as represented by Tables 1A, and 1B.

[0794] Polypeptides, polynucleotides, and antibodies of the invention are useful in the diagnosis and/or treatment of many types of cancers (e.g., of the ovary, brain, pancreas, lung, and immune cells (e.g., B cell)).

[0795] Features of Protein Encoded by Gene No: 132

[0796] The translation product of this gene shares sequence homology with predicted membrane proteins from human and mouse.

[0797] This gene is expressed primarily in Mo7e, a hematopoietic precursor cell line and to a lesser extent in Jurkat T cells, early embryo, and tumors.

[0798] Polynucleotides and polypeptides of the invention are useful as reagents for differential identification of the tissue(s) or cell type(s) present in a biological sample and for diagnosis of diseases and conditions which include but are not limited to immune related disorders including allergies and asthma. Similarly, polypeptides and antibodies directed to these polypeptides are useful in providing immunological probes for differential identification of the tissue(s) or cell type(s). For a number of disorders of the above tissues or cells, particularly of the immune/hematopoietic system, expression of this gene at significantly higher or lower levels may be routinely detected in certain tissues or cell types (e.g., cancerous and wounded tissues) or bodily fluids (e.g., serum, plasma, urine, synovial fluid and spinal fluid) or another tissue or sample taken from an individual having such a disorder, relative to the standard gene expression level, i.e., the expression level in healthy tissue or bodily fluid from an individual not having the disorder.

[0799] Embodiments of the invention encompass using polynucleotides and polypeptides (including fragments and variants thereof, and also antibodies, agonists, and antagonists thereof) to prevent, diagnose, treat, or ameliorate a disease or disorder. In preferred embodiments, the present invention encompasses a method of preventing, diagnosing, treating, or ameliorating a disease or disorder (for example, as indicated in the “Preferred Indications” column of Tables 1D, and 1E) related to one, two, three, or more, of the cells, tissues, and organs where the polynucleotide and/or polypeptide is expressed (for example, as indicated in the “Tissue Distribution” column of Table 1B); comprising administering to a patient in which such prevention, diagnosis, treatment, or amelioration is desired a protein, nucleic acid, or antibody of the invention (or fragment or variant thereof) represented by Tables 1A, and 1B, in an amount effective to prevent, diagnose, treat, or ameliorate the indicated disease or disorder.

[0800] In another embodiment, the present invention also encompasses methods of preventing, diagnosing, treating, or ameliorating a disease or disorder related to one, two, three, or more, of the cells, tissues, and organs where the polynucleotide and/or polypeptide is expressed (for example, as indicated in the “Tissue Distribution” column of Table 1B) or as indicated in the “Preferred Indications” column of Tables 1D, and 1E; comprising administering to a patient diagnostic or therapeutic molecules in combination with proteins, nucleic acids, or antibodies of the invention (or fragments or variants thereof) as represented by Tables 1A, and 1B.

[0801] The immune/hematopoietic tissue distribution indicates that polynucleotides and polypeptides corresponding to this gene are useful for the diagnosis and treatment of immune related disorders such as allergy, asthma, parasitic, bacterial and viral infections as well as autoimmune diseases such as lupus, Sjogrens disease, arthritis and ITP, immunomodulation to control transplant rejection, GVHD or to stimulate tumor killing. Additionally the gene and encoded polypeptides may be useful to treat cytopenias associated with chemotherapy regimes.

[0802] Features of Protein Encoded by Gene No: 133

[0803] The translation product of this gene shares sequence homology with tumor-associated proteins.

[0804] This gene is expressed primarily in esophageal cancer tissue.

[0805] Polynucleotides and polypeptides of the invention are useful as reagents for differential identification of the tissue(s) or cell type(s) present in a biological sample and for diagnosis of diseases and conditions which include but are not limited to cancer of the digestive tract (e.g., esophageal cancer). Similarly, polypeptides and antibodies directed to these polypeptides are useful in providing immunological probes for differential identification of the tissue(s) or cell type(s). For a number of disorders of the above tissues or cells, particularly of the digestive tract, expression of this gene at significantly higher or lower levels may be routinely detected in certain tissues or cell types (e.g., cancerous and wounded tissues) or bodily fluids (e.g., serum, plasma, urine, synovial fluid and spinal fluid) or another tissue or sample taken from an individual having such a disorder, relative to the standard gene expression level, i.e., the expression level in healthy tissue or bodily fluid from an individual not having the disorder. Embodiments of the invention encompass using polynucleotides and polypeptides (including fragments and variants thereof, and also antibodies, agonists and antagonists thereof) to prevent, diagnose, treat, or ameliorate a disease or disorder.

[0806] Embodiments of the invention encompass using polynucleotides and polypeptides (including fragments and variants thereof, and also antibodies, agonists, and antagonists thereof) to prevent, diagnose, treat, or ameliorate a disease or disorder. In preferred embodiments, the present invention encompasses a method of preventing, diagnosing, treating, or ameliorating a disease or disorder (for example, as indicated in the “Preferred Indications” column of Tables 1D, and 1E) related to one, two, three, or more, of the cells, tissues, and organs where the polynucleotide and/or polypeptide is expressed (for example, as indicated in the “Tissue Distribution” column of Table 1B); comprising administering to a patient in which such prevention, diagnosis, treatment, or amelioration is desired a protein, nucleic acid, or antibody of the invention (or fragment or variant thereof) represented by Tables 1A, and 1B, in an amount effective to prevent, diagnose, treat, or ameliorate the indicated disease or disorder.

[0807] In another embodiment, the present invention also encompasses methods of preventing, diagnosing, treating, or ameliorating a disease or disorder related to one, two, three, or more, of the cells, tissues, and organs where the polynucleotide and/or polypeptide is expressed (for example, as indicated in the “Tissue Distribution” column of Table 1B) or as indicated in the “Preferred Indications” column of Tables 1D, and 1E; comprising administering to a patient diagnostic or therapeutic molecules in combination with proteins, nucleic acids, or antibodies of the invention (or fragments or variants thereof) as represented by Tables 1A, and 1B.

[0808] The tissue distribution indicates that polynucleotides and polypeptides corresponding to this gene are useful for detection, diagnosis, prevention and treatment of gastrointestinal cancers (particularly cancers of the esophagus).

[0809] Features of Protein Encoded by Gene No: 134

[0810] The translation product of this gene shares sequence homology with Coxsackie virus and adenovirus receptor BCAR which is thought to be important in mediating virus entry into cells.

[0811] This gene is expressed primarily in eosinophils and to a lesser extent in dendritic cells, neutrophils.

[0812] Polynucleotides and polypeptides of the invention are useful as reagents for differential identification of the tissue(s) or cell type(s) present in a biological sample and for diagnosis of diseases and conditions which include but are not limited to immune related disorders such as allergy and asthma. Similarly, polypeptides and antibodies directed to these polypeptides are useful in providing immunological probes for differential identification of the tissue(s) or cell type(s). For a number of disorders of the above tissues or cells, particularly of the immune and respiratory systems, expression of this gene at significantly higher or lower levels may be routinely detected in certain tissues or cell types (e.g., cancerous and wounded tissues) or bodily fluids (e.g., serum, plasma, urine, synovial fluid and spinal fluid) or another tissue or sample taken from an individual having such a disorder, relative to the standard gene expression level, i.e., the expression level in healthy tissue or bodily fluid from an individual not having the disorder. Embodiments of the invention encompass using polynucleotides and polypeptides (including fragments and variants thereof, and also antibodies, agonists and antagonists thereof) to prevent, diagnose, treat, or ameliorate a disease or disorder.

[0813] Embodiments of the invention encompass using polynucleotides and polypeptides (including fragments and variants thereof, and also antibodies, agonists, and antagonists thereof) to prevent, diagnose, treat, or ameliorate a disease or disorder. In preferred embodiments, the present invention encompasses a method of preventing, diagnosing, treating, or ameliorating a disease or disorder (for example, as indicated in the “Preferred Indications” column of Tables 1D, and 1E) related to one, two, three, or more, of the cells, tissues, and organs where the polynucleotide and/or polypeptide is expressed (for example, as indicated in the “Tissue Distribution” column of Table 1B); comprising administering to a patient in which such prevention, diagnosis, treatment, or amelioration is desired a protein, nucleic acid, or antibody of the invention (or fragment or variant thereof) represented by Tables 1A, and 1B, in an amount effective to prevent, diagnose, treat, or ameliorate the indicated disease or disorder.

[0814] In another embodiment, the present invention also encompasses methods of preventing, diagnosing, treating, or ameliorating a disease or disorder related to one, two, three, or more, of the cells, tissues, and organs where the polynucleotide and/or polypeptide is expressed (for example, as indicated in the “Tissue Distribution” column of Table 1B) or as indicated in the “Preferred Indications” column of Tables 1D, and 1E; comprising administering to a patient diagnostic or therapeutic molecules in combination with proteins, nucleic acids, or antibodies of the invention (or fragments or variants thereof) as represented by Tables 1A, and 1B.

[0815] The immune tissue distribution indicates that polynucleotides and polypeptides corresponding to this gene are useful for the diagnosis, prevention and treatment of allergies, atopic dermatitis and asthma, as well as eosinophilia and related disorders, inflammation, autoimmune diseases such as lupus and arthritis, infection, parasitic infestations, and immune modulation in transplant rejection, GVHD and immune stimulation in cancer immunotherapy.

[0816] Features of Protein Encoded by Gene No: 135

[0817] The translation product of this gene shares sequence homology with Drosophila CREG protein, which is thought to be important in as a transcriptional modulator by interacting with factors such as E1A.

[0818] This gene is expressed primarily in dendritic cells and to a lesser extent in placenta, melanocytes, and numerous types of tumors.

[0819] Polynucleotides and polypeptides of the invention are useful as reagents for differential identification of the tissue(s) or cell type(s) present in a biological sample and for diagnosis of diseases and conditions which include but are not limited to immunological disorders including allergy and asthma. Similarly, polypeptides and antibodies directed to these polypeptides are useful in providing immunological probes for differential identification of the tissue(s) or cell type(s). For a number of disorders of the above tissues or cells, particularly of the immune system, expression of this gene at significantly higher or lower levels may be routinely detected in certain tissues or cell types (e.g., cancerous and wounded tissues) or bodily fluids (e.g., serum, plasma, urine, synovial fluid and spinal fluid) or another tissue or sample taken from an individual having such a disorder, relative to the standard gene expression level, i.e., the expression level in healthy tissue or bodily fluid from an individual not having the disorder. Embodiments of the invention encompass using polynucleotides and polypeptides (including fragments and variants thereof, and also antibodies, agonists and antagonists thereof) to prevent, diagnose, treat, or ameliorate a disease or disorder.

[0820] Embodiments of the invention encompass using polynucleotides and polypeptides (including fragments and variants thereof, and also antibodies, agonists, and antagonists thereof) to prevent, diagnose, treat, or ameliorate a disease or disorder. In preferred embodiments, the present invention encompasses a method of preventing, diagnosing, treating, or ameliorating a disease or disorder (for example, as indicated in the “Preferred Indications” column of Tables 1D, and 1E) related to one, two, three, or more, of the cells, tissues, and organs where the polynucleotide and/or polypeptide is expressed (for example, as indicated in the “Tissue Distribution” column of Table 1B); comprising administering to a patient in which such prevention, diagnosis, treatment, or amelioration is desired a protein, nucleic acid, or antibody of the invention (or fragment or variant thereof) represented by Tables 1A, and 1B, in an amount effective to prevent, diagnose, treat, or ameliorate the indicated disease or disorder.

[0821] In another embodiment, the present invention also encompasses methods of preventing, diagnosing, treating, or ameliorating a disease or disorder related to one, two, three, or more, of the cells, tissues, and organs where the polynucleotide and/or polypeptide is expressed (for example, as indicated in the “Tissue Distribution” column of Table 1B) or as indicated in the “Preferred Indications” column of Tables 1D, and 1E; comprising administering to a patient diagnostic or therapeutic molecules in combination with proteins, nucleic acids, or antibodies of the invention (or fragments or variants thereof) as represented by Tables 1A, and 1B.

[0822] The tissue distribution within dendritic cells indicate that polynucleotides and polypeptides corresponding to this gene are useful for the diagnosis and treatment of disorders of the immune system including allergy and asthma, inflammation, infection, autoimmune disorders (including lupus and rheumatoid arthritis), as well as modulation of the immune response in certain medical conditions such as immunosupression during transplant rejection, or immunostimulation and antigen presentation during tumor therapy—this is especially important since this molecule appears to be expressed by dendritic cells which play a major role in antigen presentation and immune modulation.

[0823] Features of Protein Encoded by Gene No: 136

[0824] This gene is expressed primarily in kidney and gastric tumor and to a lesser extent in liver, and the digestive tract.

[0825] Polynucleotides and polypeptides of the invention are useful as reagents for differential identification of the tissue(s) or cell type(s) present in a biological sample and for diagnosis of diseases and conditions which include but are not limited to kidney disorders and stomach cancer. Similarly, polypeptides and antibodies directed to these polypeptides are useful in providing immunological probes for differential identification of the tissue(s) or cell type(s). For a number of disorders of the above tissues or cells, particularly of the renal and digestive systems, expression of this gene at significantly higher or lower levels may be routinely detected in certain tissues or cell types (e.g., cancerous and wounded tissues) or bodily fluids (e.g., serum, plasma, urine, synovial fluid and spinal fluid) or another tissue or sample taken from an individual having such a disorder, relative to the standard gene expression level, i.e., the expression level in healthy tissue or bodily fluid from an individual not having the disorder. Embodiments of the invention encompass using polynucleotides and polypeptides (including fragments and variants thereof, and also antibodies, agonists and antagonists thereof) to prevent, diagnose, treat, or ameliorate a disease or disorder.

[0826] Embodiments of the invention encompass using polynucleotides and polypeptides (including fragments and variants thereof, and also antibodies, agonists, and antagonists thereof) to prevent, diagnose, treat, or ameliorate a disease or disorder. In preferred embodiments, the present invention encompasses a method of preventing, diagnosing, treating, or ameliorating a disease or disorder (for example, as indicated in the “Preferred Indications” column of Tables 1D, and 1E) related to one, two, three, or more, of the cells, tissues, and organs where the polynucleotide and/or polypeptide is expressed (for example, as indicated in the “Tissue Distribution” column of Table 1B); comprising administering to a patient in which such prevention, diagnosis, treatment, or amelioration is desired a protein, nucleic acid, or antibody of the invention (or fragment or variant thereof) represented by Tables 1A, and 1B, in an amount effective to prevent, diagnose, treat, or ameliorate the indicated disease or disorder.

[0827] In another embodiment, the present invention also encompasses methods of preventing, diagnosing, treating, or ameliorating a disease or disorder related to one, two, three, or more, of the cells, tissues, and organs where the polynucleotide and/or polypeptide is expressed (for example, as indicated in the “Tissue Distribution” column of Table 1B) or as indicated in the “Preferred Indications” column of Tables 1D, and 1E; comprising administering to a patient diagnostic or therapeutic molecules in combination with proteins, nucleic acids, or antibodies of the invention (or fragments or variants thereof) as represented by Tables 1A, and 1B.

[0828] The tissue distribution indicates that polynucleotides and polypeptides corresponding to this gene are useful for the treatment and/or detection of renal disorders including renal failure, kidney stones, renal colic, renal diabetes, renal hypertension, renal osteodystrophy and Wilms' tumor; and for the detection/treatment of digestive tract disorders including stomach cancer, intestinal bowel disease, Crohn's disease and ulceration.

[0829] Features of Protein Encoded by Gene No: 137

[0830] This gene is expressed primarily in colon, ovarian tumor, and stomach tumor.

[0831] Polynucleotides and polypeptides of the invention are useful as reagents for differential identification of the tissue(s) or cell type(s) present in a biological sample and for diagnosis of diseases and conditions which include but are not limited to gastrointestinal and ovarian cancer and other proliferative disorders. Similarly, polypeptides and antibodies directed to these polypeptides are useful in providing immunological probes for differential identification of the tissue(s) or cell type(s). For a number of disorders of the above tissues or cells, particularly of the digestive and reproductive systems, expression of this gene at significantly higher or lower levels may be routinely detected in certain tissues or cell types (e.g., cancerous and wounded tissues) or bodily fluids (e.g., serum, plasma, urine, synovial fluid and spinal fluid) or another tissue or sample taken from an individual having such a disorder, relative to the standard gene expression level, i.e., the expression level in healthy tissue or bodily fluid from an individual not having the disorder.

[0832] The tissue distribution indicates that polynucleotides and polypeptides corresponding to this gene are useful for diagnosis and treatment of cancer and other proliferative disorders, particularly of the digestive and reproductive systems.

[0833] Embodiments of the invention encompass using polynucleotides and polypeptides (including fragments and variants thereof, and also antibodies, agonists, and antagonists thereof) to prevent, diagnose, treat, or ameliorate a disease or disorder. In preferred embodiments, the present invention encompasses a method of preventing, diagnosing, treating, or ameliorating a disease or disorder (for example, as indicated in the “Preferred Indications” column of Tables 1D, and 1E) related to one, two, three, or more, of the cells, tissues, and organs where the polynucleotide and/or polypeptide is expressed (for example, as indicated in the “Tissue Distribution” column of Table 1B); comprising administering to a patient in which such prevention, diagnosis, treatment, or amelioration is desired a protein, nucleic acid, or antibody of the invention (or fragment or variant thereof) represented by Tables 1A, and 1B, in an amount effective to prevent, diagnose, treat, or ameliorate the indicated disease or disorder.

[0834] In another embodiment, the present invention also encompasses methods of preventing, diagnosing, treating, or ameliorating a disease or disorder related to one, two, three, or more, of the cells, tissues, and organs where the polynucleotide and/or polypeptide is expressed (for example, as indicated in the “Tissue Distribution” column of Table 1B) or as indicated in the “Preferred Indications” column of Tables 1D, and 1E; comprising administering to a patient diagnostic or therapeutic molecules in combination with proteins, nucleic acids, or antibodies of the invention (or fragments or variants thereof) as represented by Tables 1A, and 1B.

[0835] Features of Protein Encoded by Gene No: 138

[0836] The translation product of this gene shares sequence homology with mammary tumor protein mat8 precursor, FXYD domain-containing ion transport regulator 3, which may function as a chloride channel or as a chloride channel regulator.

[0837] This gene is expressed primarily in renal cell carcinoma (eosinophilic type), and in other cancer tissues.

[0838] Polynucleotides and polypeptides of the invention are useful as reagents for differential identification of the tissue(s) or cell type(s) present in a biological sample and for diagnosis of diseases and conditions which include but are not limited to: disorders in renal system (particularly renal cancer). Similarly, polypeptides and antibodies directed to these polypeptides are useful in providing immunological probes for differential identification of the tissue(s) or cell type(s). For a number of disorders of the above tissues or cells, particularly of the renal system, expression of this gene at significantly higher or lower levels may be routinely detected in certain tissues or cell types (e.g., cancerous and wounded tissues) or bodily fluids (e.g., serum, plasma, urine, synovial fluid and spinal fluid) or another tissue or sample taken from an individual having such a disorder, relative to the standard gene expression level, i.e., the expression level in healthy tissue or bodily fluid from an individual not having the disorder. Embodiments of the invention encompass using polynucleotides and polypeptides (including fragments and variants thereof, and also antibodies, agonists and antagonists thereof) to prevent, diagnose, treat, or ameliorate a disease or disorder.

[0839] Embodiments of the invention encompass using polynucleotides and polypeptides (including fragments and variants thereof, and also antibodies, agonists, and antagonists thereof) to prevent, diagnose, treat, or ameliorate a disease or disorder. In preferred embodiments, the present invention encompasses a method of preventing, diagnosing, treating, or ameliorating a disease or disorder (for example, as indicated in the “Preferred Indications” column of Tables 1D, and 1E) related to one, two, three, or more, of the cells, tissues, and organs where the polynucleotide and/or polypeptide is expressed (for example, as indicated in the “Tissue Distribution” column of Table 1B); comprising administering to a patient in which such prevention, diagnosis, treatment, or amelioration is desired a protein, nucleic acid, or antibody of the invention (or fragment or variant thereof) represented by Tables 1A, and 1B, in an amount effective to prevent, diagnose, treat, or ameliorate the indicated disease or disorder.

[0840] In another embodiment, the present invention also encompasses methods of preventing, diagnosing, treating, or ameliorating a disease or disorder related to one, two, three, or more, of the cells, tissues, and organs where the polynucleotide and/or polypeptide is expressed (for example, as indicated in the “Tissue Distribution” column of Table 1B) or as indicated in the “Preferred Indications” column of Tables 1D, and 1E; comprising administering to a patient diagnostic or therapeutic molecules in combination with proteins, nucleic acids, or antibodies of the invention (or fragments or variants thereof) as represented by Tables 1A, and 1B.

[0841] The tissue distribution and homology to FXYD domain-containing ion transport regulator 3, indicates that polynucleotides and polypeptides corresponding to this gene are useful for diagnosis and treatment of disorders, including cancers, in renal system.

[0842] Features of Protein Encoded by Gene No: 139

[0843] The translation product of this gene shares sequence homology with a tumor endothelial marker 1 precursor (endosialin protein) which is thought to be important as a marker of tumor endothelium.

[0844] This gene is expressed primarily in cardiovascular, digestive and musculoskeletal systems and to a lesser extent in multiple other tissues.

[0845] Polynucleotides and polypeptides of the invention are useful as reagents for differential identification of the tissue(s) or cell type(s) present in a biological sample and for diagnosis of diseases and conditions which include but are not limited to: endotheliomas, tumors of various origins, cardiovascular diseases. Similarly, polypeptides and antibodies directed to these polypeptides are useful in providing immunological probes for differential identification of the tissue(s) or cell type(s). For a number of disorders of the above tissues or cells, particularly of the cardiovascular, musculoskeletal and digestive systems, expression of this gene at significantly higher or lower levels may be routinely detected in certain tissues or cell types (e.g., cancerous and wounded tissues) or bodily fluids (e.g., serum, plasma, urine, synovial fluid and spinal fluid) or another tissue or sample taken from an individual having such a disorder, relative to the standard gene expression level, i.e., the expression level in healthy tissue or bodily fluid from an individual not having the disorder. Embodiments of the invention encompass using polynucleotides and polypeptides (including fragments and variants thereof, and also antibodies, agonists and antagonists thereof) to prevent, diagnose, treat, or ameliorate a disease or disorder.

[0846] Embodiments of the invention encompass using polynucleotides and polypeptides (including fragments and variants thereof, and also antibodies, agonists, and antagonists thereof) to prevent, diagnose, treat, or ameliorate a disease or disorder. In preferred embodiments, the present invention encompasses a method of preventing, diagnosing, treating, or ameliorating a disease or disorder (for example, as indicated in the “Preferred Indications” column of Tables 1D, and 1E) related to one, two, three, or more, of the cells, tissues, and organs where the polynucleotide and/or polypeptide is expressed (for example, as indicated in the “Tissue Distribution” column of Table 1B); comprising administering to a patient in which such prevention, diagnosis, treatment, or amelioration is desired a protein, nucleic acid, or antibody of the invention (or fragment or variant thereof) represented by Tables 1A, and 1B, in an amount effective to prevent, diagnose, treat, or ameliorate the indicated disease or disorder.

[0847] In another embodiment, the present invention also encompasses methods of preventing, diagnosing, treating, or ameliorating a disease or disorder related to one, two, three, or more, of the cells, tissues, and organs where the polynucleotide and/or polypeptide is expressed (for example, as indicated in the “Tissue Distribution” column of Table 1B) or as indicated in the “Preferred Indications” column of Tables 1D, and 1E; comprising administering to a patient diagnostic or therapeutic molecules in combination with proteins, nucleic acids, or antibodies of the invention (or fragments or variants thereof) as represented by Tables 1A, and 1B.

[0848] The tissue distribution and homology to indicates that polynucleotides and polypeptides corresponding to this gene are useful for diagnosis and/or treatment of endotheliomas, cancer, cardiovascular diseases, disorders of the digestive system

[0849] Features of Protein Encoded by Gene No: 140

[0850] The translation product of this gene shares sequence homology with a mitochondrial transmembrane protein sideroflexin which is thought to be important in the pleiotropic hematological and skeletal phenotype of flexed-tail (f/f) mice.

[0851] This gene is expressed primarily in ovary, adenocarcinoma cell line, germinal center B cell, brain, and kidney, and to a lesser extent in prostate, thyroid, HL-60 leukemia cells.

[0852] Polynucleotides and polypeptides of the invention are useful as reagents for differential identification of the tissue(s) or cell type(s) present in a biological sample and for diagnosis of diseases and conditions which include but are not limited to cancer, hematological, or skeletal disorders. Similarly, polypeptides and antibodies directed to these polypeptides are useful in providing immunological probes for differential identification of the tissue(s) or cell type(s). For a number of disorders of the above tissues or cells, particularly of the hematopoietic, skeletal and female reproductive systems, expression of this gene at significantly higher or lower levels may be routinely detected in certain tissues or cell types (e.g., cancerous and wounded tissues) or bodily fluids (e.g., serum, plasma, urine, synovial fluid and spinal fluid) or another tissue or sample taken from an individual having such a disorder, relative to the standard gene expression level, i.e., the expression level in healthy tissue or bodily fluid from an individual not having the disorder.

[0853] Embodiments of the invention encompass using polynucleotides and polypeptides (including fragments and variants thereof, and also antibodies, agonists, and antagonists thereof) to prevent, diagnose, treat, or ameliorate a disease or disorder. In preferred embodiments, the present invention encompasses a method of preventing, diagnosing, treating, or ameliorating a disease or disorder (for example, as indicated in the “Preferred Indications” column of Tables 1D, and 1E) related to one, two, three, or more, of the cells, tissues, and organs where the polynucleotide and/or polypeptide is expressed (for example, as indicated in the “Tissue Distribution” column of Table 1B); comprising administering to a patient in which such prevention, diagnosis, treatment, or amelioration is desired a protein, nucleic acid, or antibody of the invention (or fragment or variant thereof) represented by Tables 1A, and 1B, in an amount effective to prevent, diagnose, treat, or ameliorate the indicated disease or disorder.

[0854] In another embodiment, the present invention also encompasses methods of preventing, diagnosing, treating, or ameliorating a disease or disorder related to one, two, three, or more, of the cells, tissues, and organs where the polynucleotide and/or polypeptide is expressed (for example, as indicated in the “Tissue Distribution” column of Table 1B) or as indicated in the “Preferred Indications” column of Tables 1D, and 1E; comprising administering to a patient diagnostic or therapeutic molecules in combination with proteins, nucleic acids, or antibodies of the invention (or fragments or variants thereof) as represented by Tables 1A, and 1B.

[0855] The tissue distribution in ovary and homology to sideroflexin indicates that polynucleotides and polypeptides corresponding to this gene are useful for hematopoietic, skeletal disorders as exemplified by the function of sideroflexin. The expression in ovary may also indicate the involvement of this gene in female reproductive and hormonal disorders.

[0856] Features of Protein Encoded by Gene No: 141

[0857] The translation product of this gene shares sequence homology with alpha 2 microglobulin.

[0858] This gene is expressed primarily in brain and esophageal cancer.

[0859] Polynucleotides and polypeptides of the invention are useful as reagents for differential identification of the tissue(s) or cell type(s) present in a biological sample and for diagnosis of diseases and conditions which include but are not limited to: esophageal cancer and neurological disorders. Similarly, polypeptides and antibodies directed to these polypeptides are useful in providing immunological probes for differential identification of the tissue(s) or cell type(s). For a number of disorders of the above tissues or cells, particularly of the central nervous system and digestive tract, expression of this gene at significantly higher or lower levels may be routinely detected in certain tissues or cell types (e.g., cancerous and wounded tissues) or bodily fluids (e.g., serum, plasma, urine, synovial fluid and spinal fluid) or another tissue or sample taken from an individual having such a disorder, relative to the standard gene expression level, i.e., the expression level in healthy tissue or bodily fluid from an individual not having the disorder. Embodiments of the invention encompass using polynucleotides and polypeptides (including fragments and variants thereof, and also antibodies, agonists and antagonists thereof) to prevent, diagnose, treat, or ameliorate a disease or disorder.

[0860] Embodiments of the invention encompass using polynucleotides and polypeptides (including fragments and variants thereof, and also antibodies, agonists, and antagonists thereof) to prevent, diagnose, treat, or ameliorate a disease or disorder. In preferred embodiments, the present invention encompasses a method of preventing, diagnosing, treating, or ameliorating a disease or disorder (for example, as indicated in the “Preferred Indications” column of Tables 1D, and 1E) related to one, two, three, or more, of the cells, tissues, and organs where the polynucleotide and/or polypeptide is expressed (for example, as indicated in the “Tissue Distribution” column of Table 1B); comprising administering to a patient in which such prevention, diagnosis, treatment, or amelioration is desired a protein, nucleic acid, or antibody of the invention (or fragment or variant thereof) represented by Tables 1A, and 1B, in an amount effective to prevent, diagnose, treat, or ameliorate the indicated disease or disorder.

[0861] In another embodiment, the present invention also encompasses methods of preventing, diagnosing, treating, or ameliorating a disease or disorder related to one, two, three, or more, of the cells, tissues, and organs where the polynucleotide and/or polypeptide is expressed (for example, as indicated in the “Tissue Distribution” column of Table 1B) or as indicated in the “Preferred Indications” column of Tables 1D, and 1E; comprising administering to a patient diagnostic or therapeutic molecules in combination with proteins, nucleic acids, or antibodies of the invention (or fragments or variants thereof) as represented by Tables 1A, and 1B.

[0862] The tissue distribution indicates that polynucleotides and polypeptides corresponding to this gene are useful for he treatment and/or detection of neurological and behavioral disorders including Alzheimer's disease, Parkinson's, epilepsy, schizophrenia, and in addition disorders of the digestive tract including esophageal cancer.

[0863] Features of Protein Encoded by Gene No: 142

[0864] This gene is expressed primarily in normal and cancerous colon tissue and to a lesser extent in kidney and liver.

[0865] Polynucleotides and polypeptides of the invention are useful as reagents for differential identification of the tissue(s) or cell type(s) present in a biological sample and for diagnosis of diseases and conditions which include but are not limited to colon cancer, diverticulitis, malignancies of the GI tract, renal cancer, liver cancer, diabetes. Similarly, polypeptides and antibodies directed to these polypeptides are useful in providing immunological probes for differential identification of the tissue(s) or cell type(s). For a number of disorders of the above tissues or cells, particularly of the gastrointestinal tract, excretory system, digestive system, expression of this gene at significantly higher or lower levels may be routinely detected in certain tissues or cell types (e.g., cancerous and wounded tissues) or bodily fluids (e.g., serum, plasma, urine, synovial fluid and spinal fluid) or another tissue or sample taken from an individual having such a disorder, relative to the standard gene expression level, i.e., the expression level in healthy tissue or bodily fluid from an individual not having the disorder. Embodiments of the invention encompass using polynucleotides and polypeptides (including fragments and variants thereof, and also antibodies, agonists and antagonists thereof) to prevent, diagnose, treat, or ameliorate a disease or disorder.

[0866] Embodiments of the invention encompass using polynucleotides and polypeptides (including fragments and variants thereof, and also antibodies, agonists, and antagonists thereof) to prevent, diagnose, treat, or ameliorate a disease or disorder. In preferred embodiments, the present invention encompasses a method of preventing, diagnosing, treating, or ameliorating a disease or disorder (for example, as indicated in the “Preferred Indications” column of Tables 1D, and 1E) related to one, two, three, or more, of the cells, tissues, and organs where the polynucleotide and/or polypeptide is expressed (for example, as indicated in the “Tissue Distribution” column of Table 1B); comprising administering to a patient in which such prevention, diagnosis, treatment, or amelioration is desired a protein, nucleic acid, or antibody of the invention (or fragment or variant thereof) represented by Tables 1A, and 1B, in an amount effective to prevent, diagnose, treat, or ameliorate the indicated disease or disorder.

[0867] In another embodiment, the present invention also encompasses methods of preventing, diagnosing, treating, or ameliorating a disease or disorder related to one, two, three, or more, of the cells, tissues, and organs where the polynucleotide and/or polypeptide is expressed (for example, as indicated in the “Tissue Distribution” column of Table 1B) or as indicated in the “Preferred Indications” column of Tables 1D, and 1E; comprising administering to a patient diagnostic or therapeutic molecules in combination with proteins, nucleic acids, or antibodies of the invention (or fragments or variants thereof) as represented by Tables 1A, and 1B.

[0868] The tissue distribution and homology to indicates that polynucleotides and polypeptides corresponding to this gene are useful for diagnosis and/or treatment of colon cancer, malignancies and other disorders of the GI tract, renal cancer, liver cancer, diabetes.

[0869] Features of Protein Encoded by Gene No: 143

[0870] This gene is expressed primarily in ovary tumor and normal stomach.

[0871] Polynucleotides and polypeptides of the invention are useful as reagents for differential identification of the tissue(s) or cell type(s) present in a biological sample and for diagnosis of diseases and conditions which include but are not limited to stomach and ovarian cancer. Similarly, polypeptides and antibodies directed to these polypeptides are useful in providing immunological probes for differential identification of the tissue(s) or cell type(s). For a number of disorders of the above tissues or cells, particularly of the gastrointestinal and reproductive systems, expression of this gene at significantly higher or lower levels may be routinely detected in certain tissues or cell types (e.g., cancerous and wounded tissues) or bodily fluids (e.g., serum, plasma, urine, synovial fluid and spinal fluid) or another tissue or sample taken from an individual having such a disorder, relative to the standard gene expression level, i.e., the expression level in healthy tissue or bodily fluid from an individual not having the disorder. The supernatant from cells transiently transfected with this gene is capable of inducing IL-2 production in human T-cell 2B9 suggesting a role in immune modulation.

[0872] Embodiments of the invention encompass using polynucleotides and polypeptides (including fragments and variants thereof, and also antibodies, agonists, and antagonists thereof) to prevent, diagnose, treat, or ameliorate a disease or disorder. In preferred embodiments, the present invention encompasses a method of preventing, diagnosing, treating, or ameliorating a disease or disorder (for example, as indicated in the “Preferred Indications” column of Tables 1D, and 1E) related to one, two, three, or more, of the cells, tissues, and organs where the polynucleotide and/or polypeptide is expressed (for example, as indicated in the “Tissue Distribution” column of Table 1B); comprising administering to a patient in which such prevention, diagnosis, treatment, or amelioration is desired a protein, nucleic acid, or antibody of the invention (or fragment or variant thereof) represented by Tables 1A, and 1B, in an amount effective to prevent, diagnose, treat, or ameliorate the indicated disease or disorder.

[0873] In another embodiment, the present invention also encompasses methods of preventing, diagnosing, treating, or ameliorating a disease or disorder related to one, two, three, or more, of the cells, tissues, and organs where the polynucleotide and/or polypeptide is expressed (for example, as indicated in the “Tissue Distribution” column of Table 1B) or as indicated in the “Preferred Indications” column of Tables 1D, and 1E; comprising administering to a patient diagnostic or therapeutic molecules in combination with proteins, nucleic acids, or antibodies of the invention (or fragments or variants thereof) as represented by Tables 1A, and 1B.

[0874] The ability of supernatants from cells transiently transfected with this gene to induce IL-2 production in human T-cell 2B9 cells indicates that polynucleotides and polypeptides corresponding to this gene are useful for modulating immune system response, and hence treating immune deficiency diseases, autoimmune disorders and/or cancer and other proliferative disorders.

[0875] Features of Protein Encoded by Gene No: 144

[0876] This gene is expressed primarily in keratinocytes, healing groin wound, and esophagus including esophageal cancer.

[0877] Polynucleotides and polypeptides of the invention are useful as reagents for differential identification of the tissue(s) or cell type(s) present in a biological sample and for diagnosis of diseases and conditions which include but are not limited to: psoriasis, esophageal cancer, wounds. Similarly, polypeptides and antibodies directed to these polypeptides are useful in providing immunological probes for differential identification of the tissue(s) or cell type(s). For a number of disorders of the above tissues or cells, particularly of the digestive tract and skin, expression of this gene at significantly higher or lower levels may be routinely detected in certain tissues or cell types (e.g., cancerous and wounded tissues) or bodily fluids (e.g., serum, plasma, urine, synovial fluid and spinal fluid) or another tissue or sample taken from an individual having such a disorder, relative to the standard gene expression level, i.e., the expression level in healthy tissue or bodily fluid from an individual not having the disorder. Embodiments of the invention encompass using polynucleotides and polypeptides (including fragments and variants thereof, and also antibodies, agonists and antagonists thereof) to prevent, diagnose, treat, or ameliorate a disease or disorder.

[0878] Embodiments of the invention encompass using polynucleotides and polypeptides (including fragments and variants thereof, and also antibodies, agonists, and antagonists thereof) to prevent, diagnose, treat, or ameliorate a disease or disorder. In preferred embodiments, the present invention encompasses a method of preventing, diagnosing, treating, or ameliorating a disease or disorder (for example, as indicated in the “Preferred Indications” column of Tables 1D, and 1E) related to one, two, three, or more, of the cells, tissues, and organs where the polynucleotide and/or polypeptide is expressed (for example, as indicated in the “Tissue Distribution” column of Table 1B); comprising administering to a patient in which such prevention, diagnosis, treatment, or amelioration is desired a protein, nucleic acid, or antibody of the invention (or fragment or variant thereof) represented by Tables 1A, and 1B, in an amount effective to prevent, diagnose, treat, or ameliorate the indicated disease or disorder.

[0879] In another embodiment, the present invention also encompasses methods of preventing, diagnosing, treating, or ameliorating a disease or disorder related to one, two, three, or more, of the cells, tissues, and organs where the polynucleotide and/or polypeptide is expressed (for example, as indicated in the “Tissue Distribution” column of Table 1B) or as indicated in the “Preferred Indications” column of Tables 1D, and 1E; comprising administering to a patient diagnostic or therapeutic molecules in combination with proteins, nucleic acids, or antibodies of the invention (or fragments or variants thereof) as represented by Tables 1A, and 1B.

[0880] The tissue distribution indicates that polynucleotides and polypeptides corresponding to this gene are useful for the detection and/or treatment of skin disorders including wound healing, psoriasis, eczema, melanoma and cancer of the digestive tract including esophageal cancer.

[0881] Features of Protein Encoded by Gene No: 145

[0882] This gene is expressed primarily in esophagus.

[0883] Polynucleotides and polypeptides of the invention are useful as reagents for differential identification of the tissue(s) or cell type(s) present in a biological sample and for diagnosis of diseases and conditions which include but are not limited to disorders of the esophagus. Similarly, polypeptides and antibodies directed to these polypeptides are useful in providing immunological probes for differential identification of the tissue(s) or cell type(s). For a number of disorders of the above tissues or cells, particularly of the esophageal and digestive system, expression of this gene at significantly higher or lower levels may be routinely detected in certain tissues or cell types (e.g., cancerous and wounded tissues) or bodily fluids (e.g., serum, plasma, urine, synovial fluid and spinal fluid) or another tissue or sample taken from an individual having such a disorder, relative to the standard gene expression level, i.e., the expression level in healthy tissue or bodily fluid from an individual not having the disorder. Embodiments of the invention encompass using polynucleotides and polypeptides (including fragments and variants thereof, and also antibodies, agonists and antagonists thereof) to prevent, diagnose, treat, or ameliorate a disease or disorder.

[0884] Embodiments of the invention encompass using polynucleotides and polypeptides (including fragments and variants thereof, and also antibodies, agonists, and antagonists thereof) to prevent, diagnose, treat, or ameliorate a disease or disorder. In preferred embodiments, the present invention encompasses a method of preventing, diagnosing, treating, or ameliorating a disease or disorder (for example, as indicated in the “Preferred Indications” column of Tables 1D, and 1E) related to one, two, three, or more, of the cells, tissues, and organs where the polynucleotide and/or polypeptide is expressed (for example, as indicated in the “Tissue Distribution” column of Table 1B); comprising administering to a patient in which such prevention, diagnosis, treatment, or amelioration is desired a protein, nucleic acid, or antibody of the invention (or fragment or variant thereof) represented by Tables 1A, and 1B, in an amount effective to prevent, diagnose, treat, or ameliorate the indicated disease or disorder.

[0885] In another embodiment, the present invention also encompasses methods of preventing, diagnosing, treating, or ameliorating a disease or disorder related to one, two, three, or more, of the cells, tissues, and organs where the polynucleotide and/or polypeptide is expressed (for example, as indicated in the “Tissue Distribution” column of Table 1B) or as indicated in the “Preferred Indications” column of Tables 1D, and 1E; comprising administering to a patient diagnostic or therapeutic molecules in combination with proteins, nucleic acids, or antibodies of the invention (or fragments or variants thereof) as represented by Tables 1A, and 1B.

[0886] The tissue distribution indicates that polynucleotides and polypeptides corresponding to this gene are useful for treatment and diagnosis of disorders of the esophageal and digestive systems including cancer.

[0887] Features of Protein Encoded by Gene No: 146

[0888] This gene is expressed primarily in colon, immune system cells and brain and to a lesser extent in several other cell types and tissues.

[0889] Polynucleotides and polypeptides of the invention are useful as reagents for differential identification of the tissue(s) or cell type(s) present in a biological sample and for diagnosis of diseases and conditions which include but are not limited to immune system disorders, diseases of the colon and digestive system, and brain disorders. Similarly, polypeptides and antibodies directed to these polypeptides are useful in providing immunological probes for differential identification of the tissue(s) or cell type(s). For a number of disorders of the above tissues or cells, particularly of the immune system, digestive system and central nervous system, expression of this gene at significantly higher or lower levels may be routinely detected in certain tissues or cell types (e.g., cancerous and wounded tissues) or bodily fluids (e.g., serum, plasma, urine, synovial fluid and spinal fluid) or another tissue or sample taken from an individual having such a disorder, relative to the standard gene expression level, i.e., the expression level in healthy tissue or bodily fluid from an individual not having the disorder. Embodiments of the invention encompass using polynucleotides and polypeptides (including fragments and variants thereof, and also antibodies, agonists and antagonists thereof) to prevent, diagnose, treat, or ameliorate a disease or disorder.

[0890] Embodiments of the invention encompass using polynucleotides and polypeptides (including fragments and variants thereof, and also antibodies, agonists, and antagonists thereof) to prevent, diagnose, treat, or ameliorate a disease or disorder. In preferred embodiments, the present invention encompasses a method of preventing, diagnosing, treating, or ameliorating a disease or disorder (for example, as indicated in the “Preferred Indications” column of Tables 1D, and 1E) related to one, two, three, or more, of the cells, tissues, and organs where the polynucleotide and/or polypeptide is expressed (for example, as indicated in the “Tissue Distribution” column of Table 1B); comprising administering to a patient in which such prevention, diagnosis, treatment, or amelioration is desired a protein, nucleic acid, or antibody of the invention (or fragment or variant thereof) represented by Tables 1A, and 1B, in an amount effective to prevent, diagnose, treat, or ameliorate the indicated disease or disorder.

[0891] In another embodiment, the present invention also encompasses methods of preventing, diagnosing, treating, or ameliorating a disease or disorder related to one, two, three, or more, of the cells, tissues, and organs where the polynucleotide and/or polypeptide is expressed (for example, as indicated in the “Tissue Distribution” column of Table 1B) or as indicated in the “Preferred Indications” column of Tables 1D, and 1E; comprising administering to a patient diagnostic or therapeutic molecules in combination with proteins, nucleic acids, or antibodies of the invention (or fragments or variants thereof) as represented by Tables 1A, and 1B.

[0892] The tissue distribution indicates that polynucleotides and polypeptides corresponding to this gene are useful for treatment and diagnosis of disorders of the CNS, immune and digestive system including cancers.

[0893] Features of Protein Encoded by Gene No: 147

[0894] This gene is expressed primarily in esophageal cancer.

[0895] Polynucleotides and polypeptides of the invention are useful as reagents for differential identification of the tissue(s) or cell type(s) present in a biological sample and for diagnosis of diseases and conditions which include but are not limited to esophageal cancer. Similarly, polypeptides and antibodies directed to these polypeptides are useful in providing immunological probes for differential identification of the tissue(s) or cell type(s). For a number of disorders of the above tissues or cells, particularly of the digestive tract, expression of this gene at significantly higher or lower levels may be routinely detected in certain tissues or cell types (e.g., cancerous and wounded tissues) or bodily fluids (e.g., serum, plasma, urine, synovial fluid and spinal fluid) or another tissue or sample taken from an individual having such a disorder, relative to the standard gene expression level, i.e., the expression level in healthy tissue or bodily fluid from an individual not having the disorder. Embodiments of the invention encompass using polynucleotides and polypeptides (including fragments and variants thereof, and also antibodies, agonists and antagonists thereof) to prevent, diagnose, treat, or ameliorate a disease or disorder.

[0896] Embodiments of the invention encompass using polynucleotides and polypeptides (including fragments and variants thereof, and also antibodies, agonists, and antagonists thereof) to prevent, diagnose, treat, or ameliorate a disease or disorder. In preferred embodiments, the present invention encompasses a method of preventing, diagnosing, treating, or ameliorating a disease or disorder (for example, as indicated in the “Preferred Indications” column of Tables 1D, and 1E) related to one, two, three, or more, of the cells, tissues, and organs where the polynucleotide and/or polypeptide is expressed (for example, as indicated in the “Tissue Distribution” column of Table 1B); comprising administering to a patient in which such prevention, diagnosis, treatment, or amelioration is desired a protein, nucleic acid, or antibody of the invention (or fragment or variant thereof) represented by Tables 1A, and 1B, in an amount effective to prevent, diagnose, treat, or ameliorate the indicated disease or disorder.

[0897] In another embodiment, the present invention also encompasses methods of preventing, diagnosing, treating, or ameliorating a disease or disorder related to one, two, three, or more, of the cells, tissues, and organs where the polynucleotide and/or polypeptide is expressed (for example, as indicated in the “Tissue Distribution” column of Table 1B) or as indicated in the “Preferred Indications” column of Tables 1D, and 1E; comprising administering to a patient diagnostic or therapeutic molecules in combination with proteins, nucleic acids, or antibodies of the invention (or fragments or variants thereof) as represented by Tables 1A, and 1B.

[0898] The tissue distribution indicates that polynucleotides and polypeptides corresponding to this gene are useful for diagnosis or therapeutic intervention in progression of esophageal cancer.

[0899] Features of Protein Encoded by Gene No: 148

[0900] This gene is expressed primarily in prostate cancer and to a lesser extent in esophageal and colon cancer.

[0901] Polynucleotides and polypeptides of the invention are useful as reagents for differential identification of the tissue(s) or cell type(s) present in a biological sample and for diagnosis of diseases and conditions which include but are not limited to prostate cancer and other disorders of the male urogenital system, and malignancies of the gastrointestinal tract. Similarly, polypeptides and antibodies directed to these polypeptides are useful in providing immunological probes for differential identification of the tissue(s) or cell type(s). For a number of disorders of the above tissues or cells, particularly of the urogenital system and GI tract, expression of this gene at significantly higher or lower levels may be routinely detected in certain tissues or cell types (e.g., cancerous and wounded tissues) or bodily fluids (e.g., serum, plasma, urine, synovial fluid and spinal fluid) or another tissue or sample taken from an individual having such a disorder, relative to the standard gene expression level, i.e., the expression level in healthy tissue or bodily fluid from an individual not having the disorder. Embodiments of the invention encompass using polynucleotides and polypeptides (including fragments and variants thereof, and also antibodies, agonists and antagonists thereof) to prevent, diagnose, treat, or ameliorate a disease or disorder.

[0902] Embodiments of the invention encompass using polynucleotides and polypeptides (including fragments and variants thereof, and also antibodies, agonists, and antagonists thereof) to prevent, diagnose, treat, or ameliorate a disease or disorder. In preferred embodiments, the present invention encompasses a method of preventing, diagnosing, treating, or ameliorating a disease or disorder (for example, as indicated in the “Preferred Indications” column of Tables 1D, and 1E) related to one, two, three, or more, of the cells, tissues, and organs where the polynucleotide and/or polypeptide is expressed (for example, as indicated in the “Tissue Distribution” column of Table 1B); comprising administering to a patient in which such prevention, diagnosis, treatment, or amelioration is desired a protein, nucleic acid, or antibody of the invention (or fragment or variant thereof) represented by Tables 1A, and 1B, in an amount effective to prevent, diagnose, treat, or ameliorate the indicated disease or disorder.

[0903] In another embodiment, the present invention also encompasses methods of preventing, diagnosing, treating, or ameliorating a disease or disorder related to one, two, three, or more, of the cells, tissues, and organs where the polynucleotide and/or polypeptide is expressed (for example, as indicated in the “Tissue Distribution” column of Table 1B) or as indicated in the “Preferred Indications” column of Tables 1D, and 1E; comprising administering to a patient diagnostic or therapeutic molecules in combination with proteins, nucleic acids, or antibodies of the invention (or fragments or variants thereof) as represented by Tables 1A, and 1B.

[0904] The tissue distribution indicates that polynucleotides and polypeptides corresponding to this gene are useful for diagnosis and/or treatment of prostate cancer, disorders of the urogenital and or gastrointestinal systems.

[0905] Features of Protein Encoded by Gene No: 149

[0906] This gene is expressed primarily in colon (normal and tumors) and to a lesser extent in dendritic cells, T cells, B cells, lymphoma, placenta, skeletal muscle, tumors from ovary, and stomach.

[0907] Polynucleotides and polypeptides of the invention are useful as reagents for differential identification of the tissue(s) or cell type(s) present in a biological sample and for diagnosis of diseases and conditions which include but are not limited to gastrointestinal disorders such as, for example, colon cancer, inflammatory bowel disease, Crohn's disease. Similarly, polypeptides and antibodies directed to these polypeptides are useful in providing immunological probes for differential identification of the tissue(s) or cell type(s). For a number of disorders of the above tissues or cells, particularly of the immune system and lower digestive tract, expression of this gene at significantly higher or lower levels may be routinely detected in certain tissues or cell types (e.g., cancerous and wounded tissues) or bodily fluids (e.g., serum, plasma, urine, synovial fluid and spinal fluid) or another tissue or sample taken from an individual having such a disorder, relative to the standard gene expression level, i.e., the expression level in healthy tissue or bodily fluid from an individual not having the disorder.

[0908] The tissue distribution indicates that polynucleotides and polypeptides corresponding to this gene are useful for immune related disorders especially of the lower gastrointestinal tract including colon cancer, inflammatory bowel disease, and Crohn's disease. The gene may also be useful for immune related disorders such as allergy and asthma, inflammation, autoimmune diseases.

[0909] Embodiments of the invention encompass using polynucleotides and polypeptides (including fragments and variants thereof, and also antibodies, agonists, and antagonists thereof) to prevent, diagnose, treat, or ameliorate a disease or disorder. In preferred embodiments, the present invention encompasses a method of preventing, diagnosing, treating, or ameliorating a disease or disorder (for example, as indicated in the “Preferred Indications” column of Tables 1D, and 1E) related to one, two, three, or more, of the cells, tissues, and organs where the polynucleotide and/or polypeptide is expressed (for example, as indicated in the “Tissue Distribution” column of Table 1B); comprising administering to a patient in which such prevention, diagnosis, treatment, or amelioration is desired a protein, nucleic acid, or antibody of the invention (or fragment or variant thereof) represented by Tables 1A, and 1B, in an amount effective to prevent, diagnose, treat, or ameliorate the indicated disease or disorder.

[0910] In another embodiment, the present invention also encompasses methods of preventing, diagnosing, treating, or ameliorating a disease or disorder related to one, two, three, or more, of the cells, tissues, and organs where the polynucleotide and/or polypeptide is expressed (for example, as indicated in the “Tissue Distribution” column of Table 1B) or as indicated in the “Preferred Indications” column of Tables 1D, and 1E; comprising administering to a patient diagnostic or therapeutic molecules in combination with proteins, nucleic acids, or antibodies of the invention (or fragments or variants thereof) as represented by Tables 1A, and 1B.

[0911] Features of Protein Encoded by Gene No: 150

[0912] This gene is expressed primarily in esophageal cancer.

[0913] Polynucleotides and polypeptides of the invention are useful as reagents for differential identification of the tissue(s) or cell type(s) present in a biological sample and for diagnosis of diseases and conditions which include but are not limited to: esophageal cancer. Similarly, polypeptides and antibodies directed to these polypeptides are useful in providing immunological probes for differential identification of the tissue(s) or cell type(s). For a number of disorders of the above tissues or cells, particularly of the digestive tract, expression of this gene at significantly higher or lower levels may be routinely detected in certain tissues or cell types (e.g., cancerous and wounded tissues) or bodily fluids (e.g., serum, plasma, urine, synovial fluid and spinal fluid) or another tissue or sample taken from an individual having such a disorder, relative to the standard gene expression level, i.e., the expression level in healthy tissue or bodily fluid from an individual not having the disorder. Embodiments of the invention encompass using polynucleotides and polypeptides (including fragments and variants thereof, and also antibodies, agonists and antagonists thereof) to prevent, diagnose, treat, or ameliorate a disease or disorder.

[0914] Embodiments of the invention encompass using polynucleotides and polypeptides (including fragments and variants thereof, and also antibodies, agonists, and antagonists thereof) to prevent, diagnose, treat, or ameliorate a disease or disorder. In preferred embodiments, the present invention encompasses a method of preventing, diagnosing, treating, or ameliorating a disease or disorder (for example, as indicated in the “Preferred Indications” column of Tables 1D, and 1E) related to one, two, three, or more, of the cells, tissues, and organs where the polynucleotide and/or polypeptide is expressed (for example, as indicated in the “Tissue Distribution” column of Table 1B); comprising administering to a patient in which such prevention, diagnosis, treatment, or amelioration is desired a protein, nucleic acid, or antibody of the invention (or fragment or variant thereof) represented by Tables 1A, and 1B, in an amount effective to prevent, diagnose, treat, or ameliorate the indicated disease or disorder.

[0915] In another embodiment, the present invention also encompasses methods of preventing, diagnosing, treating, or ameliorating a disease or disorder related to one, two, three, or more, of the cells, tissues, and organs where the polynucleotide and/or polypeptide is expressed (for example, as indicated in the “Tissue Distribution” column of Table 1B) or as indicated in the “Preferred Indications” column of Tables 1D, and 1E; comprising administering to a patient diagnostic or therapeutic molecules in combination with proteins, nucleic acids, or antibodies of the invention (or fragments or variants thereof) as represented by Tables 1A, and 1B.

[0916] The tissue distribution indicates that polynucleotides and polypeptides corresponding to this gene are useful for the treatment and/or detection of digestive tract disorders including esophageal cancer, esophagitis, stomach cancer, Intestinal Bowel disease and Crohn's disease.

[0917] Features of Protein Encoded by Gene No: 151

[0918] This gene is expressed primarily in lung, kidney and digestive tract cancers and to a lesser extent in immune cell populations and brain.

[0919] Polynucleotides and polypeptides of the invention are useful as reagents for differential identification of the tissue(s) or cell type(s) present in a biological sample and for diagnosis of diseases and conditions which include but are not limited to lung cancer and kidney disorders. Similarly, polypeptides and antibodies directed to these polypeptides are useful in providing immunological probes for differential identification of the tissue(s) or cell type(s). For a number of disorders of the above tissues or cells, particularly of the pulmonary and digestive systems, expression of this gene at significantly higher or lower levels may be routinely detected in certain tissues or cell types (e.g., cancerous and wounded tissues) or bodily fluids (e.g., serum, plasma, urine, synovial fluid and spinal fluid) or another tissue or sample taken from an individual having such a disorder, relative to the standard gene expression level, i.e., the expression level in healthy tissue or bodily fluid from an individual not having the disorder. Embodiments of the invention encompass using polynucleotides and polypeptides (including fragments and variants thereof, and also antibodies, agonists and antagonists thereof) to prevent, diagnose, treat, or ameliorate a disease or disorder.

[0920] Embodiments of the invention encompass using polynucleotides and polypeptides (including fragments and variants thereof, and also antibodies, agonists, and antagonists thereof) to prevent, diagnose, treat, or ameliorate a disease or disorder. In preferred embodiments, the present invention encompasses a method of preventing, diagnosing, treating, or ameliorating a disease or disorder (for example, as indicated in the “Preferred Indications” column of Tables 1D, and 1E) related to one, two, three, or more, of the cells, tissues, and organs where the polynucleotide and/or polypeptide is expressed (for example, as indicated in the “Tissue Distribution” column of Table 1B); comprising administering to a patient in which such prevention, diagnosis, treatment, or amelioration is desired a protein, nucleic acid, or antibody of the invention (or fragment or variant thereof) represented by Tables 1A, and 1B, in an amount effective to prevent, diagnose, treat, or ameliorate the indicated disease or disorder.

[0921] In another embodiment, the present invention also encompasses methods of preventing, diagnosing, treating, or ameliorating a disease or disorder related to one, two, three, or more, of the cells, tissues, and organs where the polynucleotide and/or polypeptide is expressed (for example, as indicated in the “Tissue Distribution” column of Table 1B) or as indicated in the “Preferred Indications” column of Tables 1D, and 1E; comprising administering to a patient diagnostic or therapeutic molecules in combination with proteins, nucleic acids, or antibodies of the invention (or fragments or variants thereof) as represented by Tables 1A, and 1B.

[0922] The tissue distribution indicates that polynucleotides and polypeptides corresponding to this gene are useful for the treatment and/or detection of lung cancer, pulmonary disorders including cystic fibrosis, kidney cancer and renal disorders including renal failure; digestive tract cancer including colon and gastric tumor' immune disorders including autoimmune disease, immundeficiencies, leukemia and lymphoma, and neurological disorders including Alzheimer's and Parkinson's diseases.

[0923] Features of Protein Encoded by Gene No: 152

[0924] This gene is expressed primarily in renal cell carcinoma.

[0925] Polynucleotides and polypeptides of the invention are useful as reagents for differential identification of the tissue(s) or cell type(s) present in a biological sample and for diagnosis of diseases and conditions which include but are not limited to renal carcinomas and other diseases of the kidney. Similarly, polypeptides and antibodies directed to these polypeptides are useful in providing immunological probes for differential identification of the tissue(s) or cell type(s). For a number of disorders of the above tissues or cells, particularly of the renal system, expression of this gene at significantly higher or lower levels may be routinely detected in certain tissues or cell types (e.g., cancerous and wounded tissues) or bodily fluids (e.g., serum, plasma, urine, synovial fluid and spinal fluid) or another tissue or sample taken from an individual having such a disorder, relative to the standard gene expression level, i.e., the expression level in healthy tissue or bodily fluid from an individual not having the disorder. Embodiments of the invention encompass using polynucleotides and polypeptides (including fragments and variants thereof, and also antibodies, agonists and antagonists thereof) to prevent, diagnose, treat, or ameliorate a disease or disorder.

[0926] Embodiments of the invention encompass using polynucleotides and polypeptides (including fragments and variants thereof, and also antibodies, agonists, and antagonists thereof) to prevent, diagnose, treat, or ameliorate a disease or disorder. In preferred embodiments, the present invention encompasses a method of preventing, diagnosing, treating, or ameliorating a disease or disorder (for example, as indicated in the “Preferred Indications” column of Tables 1D, and 1E) related to one, two, three, or more, of the cells, tissues, and organs where the polynucleotide and/or polypeptide is expressed (for example, as indicated in the “Tissue Distribution” column of Table 1B); comprising administering to a patient in which such prevention, diagnosis, treatment, or amelioration is desired a protein, nucleic acid, or antibody of the invention (or fragment or variant thereof) represented by Tables 1A, and 1B, in an amount effective to prevent, diagnose, treat, or ameliorate the indicated disease or disorder.

[0927] In another embodiment, the present invention also encompasses methods of preventing, diagnosing, treating, or ameliorating a disease or disorder related to one, two, three, or more, of the cells, tissues, and organs where the polynucleotide and/or polypeptide is expressed (for example, as indicated in the “Tissue Distribution” column of Table 1B) or as indicated in the “Preferred Indications” column of Tables 1D, and 1E; comprising administering to a patient diagnostic or therapeutic molecules in combination with proteins, nucleic acids, or antibodies of the invention (or fragments or variants thereof) as represented by Tables 1A, and 1B.

[0928] The tissue distribution indicates that polynucleotides and polypeptides corresponding to this gene are useful for diagnosis and/or treatment of diseases of the kidney, including renal cell carcinoma, and glomerular disorders.

[0929] Features of Protein Encoded by Gene No: 153

[0930] This gene is expressed primarily in stomach tumors and to a lesser extent in tumors of the colon, prostate and lymph nodes.

[0931] Polynucleotides and polypeptides of the invention are useful as reagents for differential identification of the tissue(s) or cell type(s) present in a biological sample and for diagnosis of diseases and conditions which include but are not limited to cancer; such as stomach cancer (e.g. gastric tumor), colon cancer, prostate cancer and leukemias. Similarly, polypeptides and antibodies directed to these polypeptides are useful in providing immunological probes for differential identification of the tissue(s) or cell type(s). For a number of disorders of the above tissues or cells, particularly of the digestive and immune systems, expression of this gene at significantly higher or lower levels may be routinely detected in certain tissues or cell types (e.g., cancerous and wounded tissues) or bodily fluids (e.g., serum, plasma, urine, synovial fluid and spinal fluid) or another tissue or sample taken from an individual having such a disorder, relative to the standard gene expression level, i.e., the expression level in healthy tissue or bodily fluid from an individual not having the disorder.

[0932] Embodiments of the invention encompass using polynucleotides and polypeptides (including fragments and variants thereof, and also antibodies, agonists, and antagonists thereof) to prevent, diagnose, treat, or ameliorate a disease or disorder. In preferred embodiments, the present invention encompasses a method of preventing, diagnosing, treating, or ameliorating a disease or disorder (for example, as indicated in the “Preferred Indications” column of Tables 1D, and 1E) related to one, two, three, or more, of the cells, tissues, and organs where the polynucleotide and/or polypeptide is expressed (for example, as indicated in the “Tissue Distribution” column of Table 1B); comprising administering to a patient in which such prevention, diagnosis, treatment, or amelioration is desired a protein, nucleic acid, or antibody of the invention (or fragment or variant thereof) represented by Tables 1A, and 1B, in an amount effective to prevent, diagnose, treat, or ameliorate the indicated disease or disorder.

[0933] In another embodiment, the present invention also encompasses methods of preventing, diagnosing, treating, or ameliorating a disease or disorder related to one, two, three, or more, of the cells, tissues, and organs where the polynucleotide and/or polypeptide is expressed (for example, as indicated in the “Tissue Distribution” column of Table 1B) or as indicated in the “Preferred Indications” column of Tables 1D, and 1E; comprising administering to a patient diagnostic or therapeutic molecules in combination with proteins, nucleic acids, or antibodies of the invention (or fragments or variants thereof) as represented by Tables 1A, and 1B.

[0934] The tissue distribution indicates that polynucleotides and polypeptides corresponding to this gene are useful for diagnosis or treatment of a number of neoplasms, including tumors of the stomach, colon and prostate. Its expression in a variety of eosinophil samples indicates a role in immune function, possibly in modulation of inflammation, asthma or allergy.

[0935] Features of Protein Encoded by Gene No: 154

[0936] This gene is expressed primarily in testis and cancer cells including renal cell carcinoma, ovarian cancer and colon cancer.

[0937] Polynucleotides and polypeptides of the invention are useful as reagents for differential identification of the tissue(s) or cell type(s) present in a biological sample and for diagnosis of diseases and conditions which include but are not limited to testicular, renal, ovarian, and colon cancer. Similarly, polypeptides and antibodies directed to these polypeptides are useful in providing immunological probes for differential identification of the tissue(s) or cell type(s). For a number of disorders of the above tissues or cells, particularly of the reproductive system and digestive tract, expression of this gene at significantly higher or lower levels may be routinely detected in certain tissues or cell types (e.g., cancerous and wounded tissues) or bodily fluids (e.g., serum, plasma, urine, synovial fluid and spinal fluid) or another tissue or sample taken from an individual having such a disorder, relative to the standard gene expression level, i.e., the expression level in healthy tissue or bodily fluid from an individual not having the disorder. Embodiments of the invention encompass using polynucleotides and polypeptides (including fragments and variants thereof, and also antibodies, agonists and antagonists thereof) to prevent, diagnose, treat, or ameliorate a disease or disorder.

[0938] In preferred embodiments, the present invention encompasses a method of preventing, diagnosing, treating, or ameliorating a disease or disorder (for example, as indicated in the “Preferred Indications” column of Tables 1D, and 1E) related to one, two, three, or more, of the cells, tissues, and organs where the polynucleotide and/or polypeptide is expressed (for example, as indicated in the “Tissue Distribution” column of Table 1B); comprising administering to a patient in which such prevention, diagnosis, treatment, or amelioration is desired a protein, nucleic acid, or antibody of the invention (or fragment or variant thereof) represented by Tables 1A, and 1B, in an amount effective to prevent, diagnose, treat, or ameliorate the indicated disease or disorder.

[0939] In another embodiment, the present invention also encompasses methods of preventing, diagnosing, treating, or ameliorating a disease or disorder related to one, two, three, or more, of the cells, tissues, and organs where the polynucleotide and/or polypeptide is expressed (for example, as indicated in the “Tissue Distribution” column of Table 1B) or as indicated in the “Preferred Indications” column of Tables 1D, and 1E; comprising administering to a patient diagnostic or therapeutic molecules in combination with proteins, nucleic acids, or antibodies of the invention (or fragments or variants thereof) as represented by Tables 1A, and 1B.

[0940] The tissue distribution indicates that polynucleotides and polypeptides corresponding to this gene are useful for the detection and/or treatment of cancer including renal cell carcinoma, ovarian cancer, colon cancer and reproductive disorders including male infertility.

[0941] Features of Protein Encoded by Gene No: 155

[0942] This gene is expressed primarily in reproductive including breast and ovarian cancer tissue, digestive, immune/hematopoietic, musculoskeletal, and neural/sensory tissues, and to a lesser extent in cardiovascular, connective/epithelial, and mixed fetal tissues.

[0943] Polynucleotides and polypeptides of the invention are useful as reagents for differential identification of the tissue(s) or cell type(s) present in a biological sample and for diagnosis of diseases and conditions which include but are not limited to: disorders, including cancers, in reproductive, digestive, immune/hematopoietic, musculoskeletal, neural/sensory, cardiovascular, connective/epithelial, and mixed fetal tissues/organs. Similarly, polypeptides and antibodies directed to these polypeptides are useful in providing immunological probes for differential identification of the tissue(s) or cell type(s). For a number of disorders of the above tissues or cells, particularly of the reproductive, digestive, immune/hematopoietic, musculoskeletal, neural/sensory, cardiovascular, connective/epithelial, expression of this gene at significantly higher or lower levels may be routinely detected in certain tissues or cell types (e.g., cancerous and wounded tissues) or bodily fluids (e.g., serum, plasma, urine, synovial fluid and spinal fluid) or another tissue or sample taken from an individual having such a disorder, relative to the standard gene expression level, i.e., the expression level in healthy tissue or bodily fluid from an individual not having the disorder.

[0944] Embodiments of the invention encompass using polynucleotides and polypeptides (including fragments and variants thereof, and also antibodies, agonists, and antagonists thereof) to prevent, diagnose, treat, or ameliorate a disease or disorder. In preferred embodiments, the present invention encompasses a method of preventing, diagnosing, treating, or ameliorating a disease or disorder (for example, as indicated in the “Preferred Indications” column of Tables 1D, and 1E) related to one, two, three, or more, of the cells, tissues, and organs where the polynucleotide and/or polypeptide is expressed (for example, as indicated in the “Tissue Distribution” column of Table 1B); comprising administering to a patient in which such prevention, diagnosis, treatment, or amelioration is desired a protein, nucleic acid, or antibody of the invention (or fragment or variant thereof) represented by Tables 1A, and 1B, in an amount effective to prevent, diagnose, treat, or ameliorate the indicated disease or disorder.

[0945] In another embodiment, the present invention also encompasses methods of preventing, diagnosing, treating, or ameliorating a disease or disorder related to one, two, three, or more, of the cells, tissues, and organs where the polynucleotide and/or polypeptide is expressed (for example, as indicated in the “Tissue Distribution” column of Table 1B) or as indicated in the “Preferred Indications” column of Tables 1D, and 1E; comprising administering to a patient diagnostic or therapeutic molecules in combination with proteins, nucleic acids, or antibodies of the invention (or fragments or variants thereof) as represented by Tables 1A, and 1B.

[0946] The tissue distribution indicates that polynucleotides and polypeptides corresponding to this gene are useful for diagnosis and treatment of disorders, including cancers, in reproductive, digestive, immune/hematopoietic, musculoskeletal, neural/sensory, cardiovascular, connective/epithelial tissues/systems.

[0947] Features of Protein Encoded by Gene No: 156

[0948] The translation product of this gene shares sequence homology with serpentine receptor, a secretin receptor superfamily member which is a G-protein coupled receptor protein.

[0949] This gene is expressed primarily in immune/hematopoietic and stomach cancer tissues, and to a lesser extent in neural/sensory, and gastric tumor tissues.

[0950] Polynucleotides and polypeptides of the invention are useful as reagents for differential identification of the tissue(s) or cell type(s) present in a biological sample and for diagnosis of diseases and conditions which include but are not limited to disorders in immune/hematopoietic, digestive and neural/sensory systems. Similarly, polypeptides and antibodies directed to these polypeptides are useful in providing immunological probes for differential identification of the tissue(s) or cell type(s). For a number of disorders of the above tissues or cells, particularly of the immune/hematopoietic, digestive and neural/sensory, expression of this gene at significantly higher or lower levels may be routinely detected in certain tissues or cell types (e.g., cancerous and wounded tissues) or bodily fluids (e.g., serum, plasma, urine, synovial fluid and spinal fluid) or another tissue or sample taken from an individual having such a disorder, relative to the standard gene expression level, i.e., the expression level in healthy tissue or bodily fluid from an individual not having the disorder. Embodiments of the invention encompass using polynucleotides and polypeptides (including fragments and variants thereof, and also antibodies, agonists and antagonists thereof) to prevent, diagnose, treat, or ameliorate a disease or disorder.

[0951] Embodiments of the invention encompass using polynucleotides and polypeptides (including fragments and variants thereof, and also antibodies, agonists, and antagonists thereof) to prevent, diagnose, treat, or ameliorate a disease or disorder. In preferred embodiments, the present invention encompasses a method of preventing, diagnosing, treating, or ameliorating a disease or disorder (for example, as indicated in the “Preferred Indications” column of Tables 1D, and 1E) related to one, two, three, or more, of the cells, tissues, and organs where the polynucleotide and/or polypeptide is expressed (for example, as indicated in the “Tissue Distribution” column of Table 1B); comprising administering to a patient in which such prevention, diagnosis, treatment, or amelioration is desired a protein, nucleic acid, or antibody of the invention (or fragment or variant thereof) represented by Tables 1A, and 1B, in an amount effective to prevent, diagnose, treat, or ameliorate the indicated disease or disorder.

[0952] In another embodiment, the present invention also encompasses methods of preventing, diagnosing, treating, or ameliorating a disease or disorder related to one, two, three, or more, of the cells, tissues, and organs where the polynucleotide and/or polypeptide is expressed (for example, as indicated in the “Tissue Distribution” column of Table 1B) or as indicated in the “Preferred Indications” column of Tables 1D, and 1E; comprising administering to a patient diagnostic or therapeutic molecules in combination with proteins, nucleic acids, or antibodies of the invention (or fragments or variants thereof) as represented by Tables 1A, and 1B.

[0953] The tissue distribution and homology to serpentine receptor, a secretin receptor superfamily member, indicates that polynucleotides and polypeptides corresponding to this gene are useful for diagnosis and treatment of disorders, including cancers, in immune/hematopoietic, digestive and neural/sensory systems.

[0954] Features of Protein Encoded by Gene No: 157

[0955] This gene is expressed primarily in tumors of the digestive tract, (e.g., the colon and rectum), as well as other regions of the digestive tract including liver and to a lesser extent in normal colon, normal liver and breast cancer. Despite being expressed primarily in the digestive system, the polypeptide encoded by this gene is believed to activate adipocytes (e.g., preadipocyte 3T3L1 cells). Therefore, this secreted protein is a novel enteric adipokine.

[0956] Table 1A (see, below) summarizes information concerning certain polynucleotides and polypeptides of the invention. The first column provides the gene number in the application for each clone identifier. The second column provides a unique clone identifier, “Clone ID:”, for a cDNA clone related to each contig sequence disclosed in Table 1A. Other cDNA clones that are believed to encode polypeptides of the invention include Clone ID Nos. HHMNV67, HHMME22, HLDRM43, HLQAE91, HLQFB12, HLQFT18, HUKAH51, and HLDRM43. Representative clones containing cDNA which encodes polypeptides of the invention was deposited under the Budapest Treaty in the ATCC on Feb. 12, 1998 and Sep. 17, 2001, and given ATCC Deposit Nos. 209628 and PTA-3705, respectively.

[0957] Most preferred embodiments of the invention are polypeptides comprising the mature secreted polypeptide which is predicted to consist of residues 21-151 of the foregoing sequence (SEQ ID NO:349), and biologically active fragments of the mature polypeptide (e.g., fragments which modulate preadipocytes and/or mature adipocytes). Polynucleotides encoding these polypeptides, polynucleotides that hybridize to the complementary strand of these polynucleotides (e.g., under the hybridization conditions described herein) are encompassed by the invention, as are the polypeptides encoded by these hybridizing polynucleotides. Polynucleotides encoding these polypeptides are also encompassed by the invention. Moreover, fragments and variants of these polypeptides (such as, for example, fragments as described herein, polypeptides at least 80%, 85%, 90%, 95%, 96%, 97%, 98%, or 99% identical to these polypeptides and polypeptides encoded by the polynucleotide which hybridizes, under stringent conditions, to the polynucleotide encoding these polypeptides, or the complement thereof are encompassed by the invention. Antibodies that bind polypeptides of the invention are also encompassed by the invention.

[0958] Additonal preferred polypeptides of the invention comprise or alternatively consist one or more of the following polypeptides:

```
(SEQ ID NO:375)
          VPAPKVPIKMQVKHWPSEQDPEKAWGARVVEPPEKDDQLVVLFPVQKPKLL
TTEEKPRGQGRGPILPGTKAWMETEDTLGRVLSPEPDHDSLYHPPPEEDQGEERPRL
WVMPNHQVLLGPEEDQDPIFPPQ;
(SEQ ID NO:376)
          VPAPKVPIKMQVKHWPSEQDPENRAWGARVVEPPEKDDQLVVLFPVQKPKL
LTTEEKPRGQGRGPILPGTKAWMETEDTLGRVLSPEPDHDSLYHPPPEEDQGEERPRL
WVMPNHQVLLGPEEDQDHIYHPQ;
(SEQ ID NO:377)
          VPAPKVPIKMQVKHWPSEQDPEKAWGARVVEPPEKDDQLVVLFPVQKPKLL
TTEEKPRGTKAWMETEDTLGRVLSPEPDHDSLYHPPPEEDQGEERPRLWVMPNHQV
LLGPEEDQDHIYHPQ;
and
(SEQ ID NO:378)
VPAPKVPIKMQVKHWPSEQDPEKAWGARVVEPPEKDDQLVVLFPVQPKLLTTEEK
PRGTKAWMETEDTLGRVLSPEPDHDSLYHPPPEEDQGEERPRL.
```

[0959] Polynucleotides encoding these polypeptides, polynucleotides that hybridize to the complementary strand of these polynucleotides (e.g., under the hybridization conditions described herein) are encompassed by the invention, as are the polypeptides encoded by these hybridizing polynucleotides. Polynucleotides encoding these polypeptides are also encompassed by the invention. Moreover, fragments and variants of these polypeptides (such as, for example, fragments as described herein, polypeptides at least 80%, 85%, 90%, 95%, 96%, 97%, 98%, or 99% identical to these polypeptides and polypeptides encoded by the polynucleotide which hybridizes, under stringent conditions, to the polynucleotide encoding these polypeptides, or the complement thereof are encompassed by the invention. Antibodies that bind polypeptides of the invention are also encompassed by the invention. Polynucleotides encoding these polypeptides are also encompassed by the invention.

[0960] Polynucleotides, polypeptides, antibodies, antagonists and/or agonists of the invention are useful as reagents for differential identification of the tissue(s) or cell type(s) and for diagnosis of diseases and conditions which include but are not limited to: diabetes, obesity and other metabolic diseases. In addition, polynucleotides, polypeptides, antibodies, antagonists and/or agonists of the invention are useful as an appetite stimulant and/or appetite suppressant; treatment of weight loss; treatment of AIDS wasting; and treatment of cachexia. Similarly, polypeptides and antibodies directed to these polypeptides are useful in providing immunological probes for differential identification of the tissue(s) or cell type(s). For a number of disorders of the above tissues or cells, particularly of the digestive system, liver and colon, expression of this gene at significantly higher or lower levels may be routinely detected in certain tissues or cell types (e.g., cancerous and wounded tissues) or bodily fluids (e.g., serum, plasma, urine, synovial fluid and spinal fluid) or another tissue or sample taken from an individual having such a disorder, relative to the standard gene expression level, i.e., the expression level in healthy tissue or bodily fluid from an individual not having the disorder.

[0961] As indicated above, polypeptides of the invention modulate adipocyte activity and thus, polynucleotides and polypeptides of the invention may be involved in the regulation or control the proliferation/differentiation or metabolism/physiology/pathology of adipocyte and adipose tissue in response to dietary conditions.

[0962] Therefore, polynucleotides, polypeptides, antagonist, agonists, and/or antibodies of the invention are useful for the treatment of obesity, diabetes and other metabolic diseases.

[0963] In additional preferred embodiments, a polypeptide of the invention, or polynucleotides, antibodies, agonists, or antagonists corresponding to that polypeptide, may be used to regulate weight gain, weight loss, and/or obesity.

[0964] One preferred embodiment is a method of modulating adipocyte activity (e.g., enhancing) by contacting the polypeptide of the invention with adipocytes in vivo or in vitro and measuring said activity using method known in the art.

[0965] In an additional preferred embodiment, polynucleotides, polypeptides, antibodies, antagonists and/or agonists of the invention are useful as an appetite stimulant and/or appetite suppressant. Appetite and food intake can be can be measured by methods known in the art (see, e.g., Batterham et al. Nature (2002); 418:650-654)

[0966] Polynucleotides, polypeptides, antibodies, antagonists and/or agonists of the invention may be used to treat, prevent, and/or ameliorate type II diabetes.

[0967] Additionally, in other embodiments, the polynucleotides, polypeptides, antibodies, antagonists and/or agonists of the invention (especially antibodies) may be used to treat, prevent, or ameliorate conditions associated with type II diabetes mellitus, including, but not limited to, seizures, mental confusion, drowsiness, non-ketotic hyperglycemic-hyperosmolar coma, cardiovascular disease (e.g., heart disease, atherosclerosis, microvascular disease, hypertension, stroke, and other diseases and disorders as described in the “Cardiovascular Disorders” section below), dyslipidemia, kidney disease (e.g., renal failure, nephropathy other diseases and disorders as described in the “Renal Disorders” section below), endocrine disorders (as described in the “Endocrine Disorders” section below), obesity, nerve damage, neuropathy, vision impairment (e.g., diabetic retinopathy and blindness), ulcers and impaired wound healing, infections (e.g., infectious diseases and disorders as described in the “Infectious Diseases” section below, especially of the urinary tract and skin), carpal tunnel syndrome and Dupuytren's contracture. In another embodiment, the polynucleotides and/or polypeptides of the invention and/or antagonists thereof (especially neutralizing or antagonistic antibodies) may be used to treat, prevent, and/or ameliorate diabetes and/or complication associated with diabetes. Complications associated with diabetes include: blindness (e.g., due to diabetic retinopathy), kidney disease (e.g., due to diabetic nephropathy), nerve disease (e.g., due to diabetic neuropathy) and amputations, heart disease and stroke, and impotence (e.g., due to diabetic neuropathy or blood vessel blockage.

Definitions

[0968] The following definitions are provided to facilitate understanding of certain terms used throughout this specification.

[0969] In the present invention, “isolated” refers to material removed from its original environment (e.g., the natural environment if it is naturally occurring), and thus is altered “by the hand of man” from its natural state. For example, an isolated polynucleotide could be part of a vector or a composition of matter, or could be contained within a cell, and still be “isolated” because that vector, composition of matter, or particular cell is not the original environment of the polynucleotide. The term “isolated” does not refer to genomic or cDNA libraries, whole cell total or mRNA preparations, genomic DNA preparations (including those separated by electrophoresis and transferred onto blots), sheared whole cell genomic DNA preparations or other compositions where the art demonstrates no distinguishing features of the polynucleotide/sequences of the present invention.

[0970] In the present invention, a “secreted” protein refers to those proteins capable of being directed to the ER, secretory vesicles, or the extracellular space as a result of a signal sequence, as well as those proteins released into the extracellular space without necessarily containing a signal sequence. If the secreted protein is released into the extracellular space, the secreted protein can undergo extracellular processing to produce a “mature” protein. Release into the extracellular space can occur by many mechanisms, including exocytosis and proteolytic cleavage.

[0971] As used herein, a “polynucleotide” refers to a molecule having a nucleic acid sequence encoding SEQ ID NO:Y or a fragment or variant thereof (e.g., the polypeptide delinated in columns fourteen and fifteen of Table 1A); a nucleic acid sequence contained in SEQ ID NO:X (as described in column 5 of Table 1A and/or column 3 of Table 1B) or the complement thereof; a cDNA sequence contained in Clone ID: (as described in column 2 of Table 1A and/or 1B and contained within a library deposited with the ATCC); a nucleotide sequence encoding the polypeptide encoded by a nucleotide sequence in SEQ ID NO:B as defined in column 6 (EXON From-To) of Table 1D or a fragment or variant thereof; or a nucleotide coding sequence in SEQ ID NO:B as defined in column 6 of Table 1D or the complement thereof. For example, the polynucleotide can contain the nucleotide sequence of the full length cDNA sequence, including the 5′ and 3′ untranslated sequences, the coding region, as well as fragments, epitopes, domains, and variants of the nucleic acid sequence. Moreover, as used herein, a “polypeptide” refers to a molecule having an amino acid sequence encoded by a polynucleotide of the invention as broadly defined (obviously excluding poly-Phenylalanine or poly-Lysine peptide sequences which result from translation of a polyA tail of a sequence corresponding to a cDNA).

[0972] In the present invention, “SEQ ID NO:X” was often generated by overlapping sequences contained in multiple clones (contig analysis). A representative clone containing all or most of the sequence for SEQ ID NO:X is deposited at Human Genome Sciences, Inc. (HGS) in a catalogued and archived library. As shown, for example, in column 2 of Table 1B, each clone is identified by a cDNA Clone ID (identifier generally referred to herein as Clone ID:). Each Clone ID is unique to an individual clone and the Clone ID is all the information needed to retrieve a given clone from the HGS library. Table 7 provides a list of the deposited cDNA libraries. One can use the Clone ID: to determine the library source by reference to Tables 6 and 7. Table 7 lists the deposited cDNA libraries by name and links each library to an ATCC Deposit. Library names contain four characters, for example, “HTWE.” The name of a cDNA clone (Clone ID) isolated from that library begins with the same four characters, for example “HTWEP07”. As mentioned below, Table 1A and/or 1B correlates the Clone ID names with SEQ ID NO:X. Thus, starting with an SEQ ID NO:X, one can use Tables 1A, 1B, 6, 7, and 9 to determine the corresponding Clone ID, which library it came from and which ATCC deposit the library is contained in. Furthermore, it is possible to retrieve a given cDNA clone from the source library by techniques known in the art and described elsewhere herein. The ATCC is located at 10801 University Boulevard, Manassas, Va. 20110-2209, USA. The ATCC deposits were made pursuant to the terms of the Budapest Treaty on the international recognition of the deposit of microorganisms for the purposes of patent procedure.

[0973] In specific embodiments, the polynucleotides of the invention are at least 15, at least 30, at least 50, at least 100, at least 125, at least 500, or at least 1000 continuous nucleotides but are less than or equal to 300 kb, 200 kb, 100 kb, 50 kb, 15 kb, 10 kb, 7.5 kb, 5 kb, 2.5 kb, 2.0 kb, or 1 kb, in length. In a further embodiment, polynucleotides of the invention comprise a portion of the coding sequences, as disclosed herein, but do not comprise all or a portion of any intron. In another embodiment, the polynucleotides comprising coding sequences do not contain coding sequences of a genomic flanking gene (i.e., 5′ or 3′ to the gene of interest in the genome). In other embodiments, the polynucleotides of the invention do not contain the coding sequence of more than 1000, 500, 250, 100, 50, 25, 20, 15, 10, 5, 4, 3, 2, or 1 genomic flanking gene(s).

[0974] A “polynucleotide” of the present invention also includes those polynucleotides capable of hybridizing, under stringent hybridization conditions, to sequences contained in SEQ ID NO:X, or the complement thereof (e.g., the complement of any one, two, three, four, or more of the polynucleotide fragments described herein), the polynucleotide sequence delineated in columns 7 and 8 of Table 1A or the complement thereof, the polynucleotide sequence delineated in columns 8 and 9 of Table 2 or the complement thereof, and/or cDNA sequences contained in Clone ID: (e.g., the complement of any one, two, three, four, or more of the polynucleotide fragments, or the cDNA clone within the pool of cDNA clones deposited with the ATCC, described herein), and/or the polynucleotide sequence delineated in column 6 of Table 1D or the complement thereof. “Stringent hybridization conditions” refers to an overnight incubation at 42 degree C. in a solution comprising 50% formamide, 5×SSC (750 mM NaCl, 75 mM trisodium citrate), 50 mM sodium phosphate (pH 7.6), 5× Denhardt's solution, 10% dextran sulfate, and 20 μg/ml denatured, sheared salmon sperm DNA, followed by washing the filters in 0.1×SSC at about 65 degree C.

[0975] Also contemplated are nucleic acid molecules that hybridize to the polynucleotides of the present invention at lower stringency hybridization conditions. Changes in the stringency of hybridization and signal detection are primarily accomplished through the manipulation of formamide concentration (lower percentages of formamide result in lowered stringency); salt conditions, or temperature. For example, lower stringency conditions include an overnight incubation at 37 degree C. in a solution comprising 6×SSPE (20×SSPE=3M NaCl; 0.2M NaH₂PO₄; 0.02M EDTA, pH 7.4), 0.5% SDS, 30% formamide, 100 ug/ml salmon sperm blocking DNA; followed by washes at 50 degree C. with 1×SSPE, 0.1% SDS. In addition, to achieve even lower stringency, washes performed following stringent hybridization can be done at higher salt concentrations (e.g. 5×SSC).

[0976] Note that variations in the above conditions may be accomplished through the inclusion and/or substitution of alternate blocking reagents used to suppress background in hybridization experiments. Typical blocking reagents include Denhardt's reagent, BLOTTO, heparin, denatured salmon sperm DNA, and commercially available proprietary formulations. The inclusion of specific blocking reagents may require modification of the hybridization conditions described above, due to problems with compatibility.

[0977] Of course, a polynucleotide which hybridizes only to polyA+ sequences (such as any 3′ terminal polyA+ tract of a cDNA shown in the sequence listing), or to a complementary stretch of T (or U) residues, would not be included in the definition of “polynucleotide,” since such a polynucleotide would hybridize to any nucleic acid molecule containing a poly (A) stretch or the complement thereof (e.g., practically any double-stranded cDNA clone generated using oligo dT as a primer).

[0978] The polynucleotide of the present invention can be composed of any polyribonucleotide or polydeoxribonucleotide, which may be unmodified RNA or DNA or modified RNA or DNA. For example, polynucleotides can be composed of single- and double-stranded DNA, DNA that is a mixture of single- and double-stranded regions, single- and double-stranded RNA, and RNA that is mixture of single- and double-stranded regions, hybrid molecules comprising DNA and RNA that may be single-stranded or, more typically, double-stranded or a mixture of single- and double-stranded regions. In addition, the polynucleotide can be composed of triple-stranded regions comprising RNA or DNA or both RNA and DNA. A polynucleotide may also contain one or more modified bases or DNA or RNA backbones modified for stability or for other reasons. “Modified” bases include, for example, tritylated bases and unusual bases such as inosine. A variety of modifications can be made to DNA and RNA; thus, “polynucleotide” embraces chemically, enzymatically, or metabolically modified forms.

[0979] In specific embodiments, the polynucleotides of the invention are at least 15, at least 30, at least 50, at least 100, at least 125, at least 500, or at least 1000 continuous nucleotides but are less than or equal to 300 kb, 200 kb, 100 kb, 50 kb, 15 kb, 10 kb, 7.5 kb, 5 kb, 2.5 kb, 2.0 kb, or 1 kb, in length. In a further embodiment, polynucleotides of the invention comprise a portion of the coding sequences, as disclosed herein, but do not comprise all or a portion of any intron. In another embodiment, the polynucleotides comprising coding sequences do not contain coding sequences of a genomic flanking gene (i.e., 5′ or 3′ to the gene of interest in the genome). In other embodiments, the polynucleotides of the invention do not contain the coding sequence of more than 1000, 500, 250, 100, 50, 25, 20, 15, 10, 5, 4, 3, 2, or 1 genomic flanking gene(s).

[0980] “SEQ ID NO:X” refers to a polynucleotide sequence described in column 5 of Table 1A, while “SEQ ID NO:Y” refers to a polypeptide sequence described in column 10 of Table 1A. SEQ ID NO:X is identified by an integer specified in column 6 of Table 1A. The polypeptide sequence SEQ ID NO:Y is a translated open reading frame (ORF) encoded by polynucleotide SEQ ID NO:X. The polynucleotide sequences are shown in the sequence listing immediately followed by all of the polypeptide sequences. Thus, a polypeptide sequence corresponding to polynucleotide sequence SEQ ID NO:2 is the first polypeptide sequence shown in the sequence listing. The second polypeptide sequence corresponds to the polynucleotide sequence shown as SEQ ID NO:3, and so on.

[0981] The polypeptide of the present invention can be composed of amino acids joined to each other by peptide bonds or modified peptide bonds, i.e., peptide isosteres, and may contain amino acids other than the 20 gene-encoded amino acids. The polypeptides may be modified by either natural processes, such as posttranslational processing, or by chemical modification techniques which are well known in the art. Such modifications are well described in basic texts and in more detailed monographs, as well as in a voluminous research literature. Modifications can occur anywhere in a polypeptide, including the peptide backbone, the amino acid side-chains and the amino or carboxyl termini. It will be appreciated that the same type of modification may be present in the same or varying degrees at several sites in a given polypeptide. Also, a given polypeptide may contain many types of modifications. Polypeptides may be branched, for example, as a result of ubiquitination, and they may be cyclic, with or without branching. Cyclic, branched, and branched cyclic polypeptides may result from posttranslation natural processes or may be made by synthetic methods. Modifications include acetylation, acylation, ADP-ribosylation, amidation, covalent attachment of flavin, covalent attachment of a heme moiety, covalent attachment of a nucleotide or nucleotide derivative, covalent attachment of a lipid or lipid derivative, covalent attachment of phosphotidylinositol, cross-linking, cyclization, disulfide bond formation, demethylation, formation of covalent cross-links, formation of cysteine, formation of pyroglutamate, formylation, gamma-carboxylation, glycosylation, GPI anchor formation, hydroxylation, iodination, methylation, myristoylation, oxidation, pegylation, proteolytic processing, phosphorylation, prenylation, racemization, selenoylation, sulfation, transfer-RNA mediated addition of amino acids to proteins such as arginylation, and ubiquitination. (See, for instance, PROTEINS—STRUCTURE AND MOLECULAR PROPERTIES, 2nd Ed., T. E. Creighton, W. H. Freeman and Company, New York (1993); POSTTRANSLATIONAL COVALENT MODIFICATION OF PROTEINS, B. C. Johnson, Ed., Academic Press, New York, pgs. 1-12 (1983); Seifter et al., Meth. Enzymol. 182:626-646 (1990); Rattan et al., Ann. N.Y. Acad. Sci. 663:48-62 (1992)).

[0982] “SEQ ID NO:X” refers to a polynucleotide sequence described, for example, in Tables 1A, 1B or 2, while “SEQ ID NO:Y” refers to a polypeptide sequence described in column 11 of Table 1A and or column 6 of Table 1B. SEQ ID NO:X is identified by an integer specified in column 3 of Table 1B. The polypeptide sequence SEQ ID NO:Y is a translated open reading frame (ORF) encoded by polynucleotide SEQ ID NO:X. “Clone ID:” refers to a cDNA clone described in column 2 of Table 1A and/or 1B.

[0983] “A polypeptide having functional activity” refers to a polypeptide capable of displaying one or more known functional activities associated with a full-length (complete) protein. Such functional activities include, but are not limited to, biological activity, antigenicity [ability to bind (or compete with a polypeptide for binding) to an anti-polypeptide antibody], immunogenicity (ability to generate antibody which binds to a specific polypeptide of the invention), ability to form multimers with polypeptides of the invention, and ability to bind to a receptor or ligand for a polypeptide.

[0984] The polypeptides of the invention can be assayed for functional activity (e.g. biological activity) using or routinely modifying assays known in the art, as well as assays described herein. Specifically, one of skill in the art may routinely assay secreted polypeptides (including fragments and variants) of the invention for activity using assays as described in the examples section below.

[0985] “A polypeptide having biological activity” refers to a polypeptide exhibiting activity similar to, but not necessarily identical to, an activity of a polypeptide of the present invention, including mature forms, as measured in a particular biological assay, with or without dose dependency. In the case where dose dependency does exist, it need not be identical to that of the polypeptide, but rather substantially similar to the dose-dependence in a given activity as compared to the polypeptide of the present invention (i.e., the candidate polypeptide will exhibit greater activity or not more than about 25-fold less and, preferably, not more than about tenfold less activity, and most preferably, not more than about three-fold less activity relative to the polypeptide of the present invention).

### Description of the Tables

Description of Table 1A

[0986] Table 1A summarizes information concerning certain polynucleotides and polypeptides of the invention.

[0987] The first column provides the gene number in the application for each clone identifier.

[0988] The second column provides a unique clone identifier, “Clone ID:”, for a cDNA clone related to each contig sequence disclosed in Table 1A.

[0989] In the third column, the cDNA Clones identified in the second column were deposited as indicated (i.e., by ATCC Deposit No:Z and deposit date). Some of the deposits contain multiple different clones corresponding to the same gene.

[0990] In the fourth column, “Vector” refers to the type of vector contained in the corresponding cDNA Clone identified in the second column.

[0991] In the fifth column, the nucleotide sequence identified as “NT SEQ ID NO:X” was assembled from partially homologous (“overlapping”) sequences obtained from the corresponding cDNA clone identified in the second column and, in some cases, from additional related cDNA clones. The overlapping sequences were assembled into a single contiguous sequence of high redundancy (usually three to five overlapping sequences at each nucleotide position), resulting in a final sequence identified as SEQ ID NO:X.

[0992] The sixth column, “Total NT Seq.”, refers to the total number of nucleotides in the contig sequence identified as SEQ ID NO:X.”

[0993] The deposited clone may contain all or most of these sequences, reflected by the nucleotide position indicated as “5′ NT of Clone Seq.” (seventh column) and the “3′ NT of Clone Seq.” (eighth column) of SEQ ID NO:X.

[0994] In the ninth column, the nucleotide position of SEQ ID NO:X of the putative start codon (methionine) is identified as “5′ NT of Start Codon.”

[0995] Similarly, in column ten, the nucleotide position of SEQ ID NO:X of the predicted signal sequence is identified as “5′ NT of First AA of Signal Pep.”

[0996] In the eleventh column, the translated amino acid sequence, beginning with the methionine, is identified as “AA SEQ ID NO:Y,” although other reading frames can also be routinely translated using known molecular biology techniques. The polypeptides produced by these alternative open reading frames are specifically contemplated by the present invention.

[0997] In the twelfth and thirteenth columns of Table 1A, the first and last amino acid position of SEQ ID NO:Y of the predicted signal peptide is identified as “First AA of Sig Pep” and “Last AA of Sig Pep.”

[0998] In the fourteenth column, the predicted first amino acid position of SEQ ID NO:Y of the secreted portion is identified as “Predicted First AA of Secreted Portion”.

[0999] The amino acid position of SEQ ID NO:Y of the last amino acid encoded by the open reading frame is identified in the fifteenth column as “Last AA of ORF”.

[1000] SEQ ID NO:X (where X may be any of the polynucleotide sequences disclosed in the sequence listing) and the translated SEQ ID NO:Y (where Y may be any of the polypeptide sequences disclosed in the sequence listing) are sufficiently accurate and otherwise suitable for a variety of uses well known in the art and described further below. For instance, SEQ ID NO:X is useful for designing nucleic acid hybridization probes that will detect nucleic acid sequences contained in SEQ ID NO:X or the cDNA contained in the deposited clone. These probes will also hybridize to nucleic acid molecules in biological samples, thereby enabling a variety of forensic and diagnostic methods of the invention. Similarly, polypeptides identified from SEQ ID NO:Y may be used, for example, to generate antibodies which bind specifically to proteins containing the polypeptides and the secreted proteins encoded by the cDNA clones identified in Table 1A and/or elsewhere herein

[1001] Nevertheless, DNA sequences generated by sequencing reactions can contain sequencing errors. The errors exist as misidentified nucleotides, or as insertions or deletions of nucleotides in the generated DNA sequence. The erroneously inserted or deleted nucleotides cause frame shifts in the reading frames of the predicted amino acid sequence. In these cases, the predicted amino acid sequence diverges from the actual amino acid sequence, even though the generated DNA sequence may be greater than 99.9% identical to the actual DNA sequence (for example, one base insertion or deletion in an open reading frame of over 1000 bases).

[1002] Accordingly, for those applications requiring precision in the nucleotide sequence or the amino acid sequence, the present invention provides not only the generated nucleotide sequence identified as SEQ ID NO:X, and the predicted translated amino acid sequence identified as SEQ ID NO:Y, but also a sample of plasmid DNA containing a human cDNA of the invention deposited with the ATCC, as set forth in Table 1A. The nucleotide sequence of each deposited plasmid can readily be determined by sequencing the deposited plasmid in accordance with known methods

[1003] The predicted amino acid sequence can then be verified from such deposits. Moreover, the amino acid sequence of the protein encoded by a particular plasmid can also be directly determined by peptide sequencing or by expressing the protein in a suitable host cell containing the deposited human cDNA, collecting the protein, and determining its sequence. Also provided in Table 1A, is the name of the vector which contains the cDNA plasmid (fourth column). Each vector is routinely used in the art. The following additional information is provided for convenience.

[1004] Vectors Lambda Zap (U.S. Pat. Nos. 5,128,256 and 5,286,636), Uni-Zap XR (U.S. Pat. Nos. 5,128,256 and 5,286,636), Zap Express (U.S. Pat. Nos. 5,128,256 and 5,286,636), pBluescript (pBS) (Short, J. M. et al., Nucleic Acids Res. 16:7583-7600 (1988); Alting-Mees, M. A. and Short, J. M., Nucleic Acids Res. 17:9494 (1989)) and pBK (Alting-Mees, M. A. et al., Strategies 5:58-61 (1992)) are commercially available from Stratagene Cloning Systems, Inc., 11011 N. Torrey Pines Road, La Jolla, Calif., 92037. pBS contains an ampicillin resistance gene and pBK contains a neomycin resistance gene. Phagemid pBS may be excised from the Lambda Zap and Uni-Zap XR vectors, and phagemid pBK may be excised from the Zap Express vector. Both phagemids may be transformed into E. coli strain XL-1 Blue, also available from Stratagene

[1005] Vectors pSport1, pCMVSport 1.0, pCMVSport 2.0 and pCMVSport 3.0, were obtained from Life Technologies, Inc., P.O. Box 6009, Gaithersburg, Md. 20897. All Sport vectors contain an ampicillin resistance gene and may be transformed into E. coli strain DH10B, also available from Life Technologies. See, for instance, Gruber, C. E., et al., Focus 15:59 (1993). Vector lafmid BA (Bento Soares, Columbia University, New York, N.Y.) contains an ampicillin resistance gene and can be transformed into E. coli strain XL-1 Blue. Vector pCR®2.1, which is available from Invitrogen, 1600 Faraday Avenue, Carlsbad, Calif. 92008, contains an ampicillin resistance gene and may be transformed into E. coli strain DH10B, available from Life Technologies. See, for instance, Clark, J. M., Nuc. Acids Res. 16:9677-9686 (1988) and Mead, D. et al., Bio/Technology 9: (1991).

[1006] The present invention also relates to the genes corresponding to SEQ ID NO:X, SEQ ID NO:Y, and/or a deposited cDNA (cDNA Clone ID). The corresponding gene can be isolated in accordance with known methods using the sequence information disclosed herein. Such methods include, but are not limited to, preparing probes or primers from the disclosed sequence and identifying or amplifying the corresponding gene from appropriate sources of genomic material.

[1007] Also provided in the present invention are allelic variants, orthologs, and/or species homologs. Procedures known in the art can be used to obtain full-length genes, allelic variants, splice variants, full-length coding portions, orthologs, and/or species homologs of genes corresponding to SEQ ID NO:X and SEQ ID NO:Y using information from the sequences disclosed herein or the clones deposited with the ATCC. For example, allelic variants and/or species homologs may be isolated and identified by making suitable probes or primers from the sequences provided herein and screening a suitable nucleic acid source for allelic variants and/or the desired homologue.

[1008] The present invention provides a polynucleotide comprising, or alternatively consisting of, the nucleic acid sequence of SEQ ID NO:X and/or a cDNA contained in ATCC Deposit No.Z. The present invention also provides a polypeptide comprising, or alternatively, consisting of, the polypeptide sequence of SEQ ID NO:Y, a polypeptide encoded by SEQ ID NO:X, and/or a polypeptide encoded by a cDNA contained in ATCC deposit No.Z. Polynucleotides encoding a polypeptide comprising, or alternatively consisting of the polypeptide sequence of SEQ ID NO:Y, a polypeptide encoded by SEQ ID NO:X and/or a polypeptide encoded by the cDNA contained in ATCC Deposit No.Z, are also encompassed by the invention. The present invention further encompasses a polynucleotide comprising, or alternatively consisting of the complement of the nucleic acid sequence of SEQ ID NO:X, and/or the complement of the coding strand of the cDNA contained in ATCC Deposit No.Z.

TABLE 1A

| | | | | | | | | | 5′ NT | | | | | |
|---|---|---|---|---|---|---|---|---|---|---|---|---|---|---|
| | | | | | | | | | of | | First | Last | | |
| | | ATCC | | NT | | 5′ NT | 3′ NT | 5′ NT | First | AA | AA | AA | First | Last |
| | | Deposit | | SEQ | Total | of | of | of | AA of | SEQ | of | of | AA of | AA |
| Gene | cDNA | No: Z and | | ID | NT | Clone | Clone | Start | Signal | ID | Sig | Sig | Secreted | of |
| No. | Clone ID | Date | Vector | NO: X | Seq. | Seq. | Seq. | Codon | Pep | NO: Y | Pep | Pep | Portion | ORF |
| 1 | HERHC26 | PTA-3980 | pCMVSport 3.0 | 11 | 2382 | 56 | 2382 | 78 | 78 | 193 | 1 | 27 | 28 | 491 |
| | | Jan. 14, 2002 | | | | | | | | | | | | |
| 2 | HERHC24 | PTA-3980 | pCMVSport 3.0 | 12 | 524 | 1 | 524 | 23 | 23 | 194 | 1 | 21 | 22 | 167 |
| | | Jan. 14, 2002 | | | | | | | | | | | | |
| 3 | HEELM24 | PTA-3980 | pCMVSport 6 | 13 | 542 | 1 | 542 | 56 | 56 | 195 | 1 | 17 | 18 | 162 |
| | | Jan. 14, 2002 | | | | | | | | | | | | |
| 4 | HEFEZ39 | PTA-3980 | pCMVSport 6 | 14 | 531 | 1 | 531 | 132 | 132 | 196 | 1 | 28 | 29 | 133 |
| | | Jan. 14, 2002 | | | | | | | | | | | | |
| 5 | HEFFH42 | PTA-3980 | pCMVSport 6 | 15 | 1446 | 136 | 1446 | 153 | 153 | 197 | 1 | 27 | 28 | 270 |
| | | Jan. 14, 2002 | | | | | | | | | | | | |
| 6 | HLCOO14 | PTA-3980 | pCMVSport 6 | 16 | 1337 | 84 | 1337 | 297 | 297 | 198 | 1 | 26 | 27 | 252 |
| | | Jan. 14, 2002 | | | | | | | | | | | | |
| 7 | HLEFV28 | PTA-3980 | pCMVSport 6 | 17 | 497 | 1 | 497 | 99 | 99 | 199 | 1 | 20 | 21 | 133 |
| | | Jan. 14, 2002 | | | | | | | | | | | | |
| 8 | HLEGA38 | PTA-3980 | pCMVSport 6 | 18 | 521 | 16 | 521 | 74 | 74 | 200 | 1 | 20 | 21 | 149 |
| | | Jan. 14, 2002 | | | | | | | | | | | | |
| 8 | HLEGA38 | PTA-3980 | pCMVSport 6 | 168 | 792 | 34 | 792 | 109 | 109 | 350 | 1 | 20 | 21 | 102 |
| | | Jan. 14, 2002 | | | | | | | | | | | | |
| 9 | HPCBJ78 | PTA-3980 | pCMVSport 3.0 | 19 | 964 | 14 | 964 | 24 | 24 | 201 | 1 | 16 | 17 | 269 |
| | | Jan. 14, 2002 | | | | | | | | | | | | |
| 10 | HEDBJ87 | PTA-3980 | pCMVSport 6 | 20 | 495 | 1 | 495 | 62 | 62 | 202 | 1 | 18 | 19 | 144 |
| | | Jan. 14, 2002 | | | | | | | | | | | | |
| 11 | HEELE81 | PTA-3980 | pCMVSport 6 | 21 | 2600 | 35 | 2600 | 47 | 47 | 203 | 1 | 29 | 30 | 604 |
| | | Jan. 14, 2002 | | | | | | | | | | | | |
| 12 | HEFEW51 | PTA-3980 | pCMVSport 6 | 22 | 722 | 1 | 722 | 86 | 86 | 204 | 1 | 20 | 21 | 189 |
| | | Jan. 14, 2002 | | | | | | | | | | | | |
| 13 | HLEFO22 | PTA-3980 | pCMVSport 6 | 23 | 564 | 1 | 564 | 140 | 140 | 205 | 1 | 20 | 21 | 135 |
| | | Jan. 14, 2002 | | | | | | | | | | | | |
| 14 | HEELG41 | PTA-3980 | pCMVSport 6 | 24 | 535 | 1 | 535 | 44 | 44 | 206 | 1 | 24 | 25 | 164 |
| | | Jan. 14, 2002 | | | | | | | | | | | | |
| 15 | HNEMP21 | PTA-3980 | pCMVSport 6 | 25 | 1221 | 26 | 1221 | 119 | 119 | 207 | 1 | 28 | 29 | 245 |
| | | Jan. 14, 2002 | | | | | | | | | | | | |
| 16 | HNEMU30 | PTA-3980 | pCMVSport 6 | 26 | 790 | 1 | 790 | 118 | 118 | 208 | 1 | 27 | 28 | 120 |
| | | Jan. 14, 2002 | | | | | | | | | | | | |
| 17 | HNEMO56 | PTA-3980 | pCMVSport 6 | 27 | 813 | 169 | 813 | 233 | 233 | 209 | 1 | 20 | 21 | 151 |
| | | Jan. 14, 2002 | | | | | | | | | | | | |
| 18 | HEELQ12 | PTA-3980 | pCMVSport 6 | 28 | 701 | 1 | 701 | 79 | 79 | 210 | 1 | 30 | 31 | 186 |
| | | Jan. 14, 2002 | | | | | | | | | | | | |
| 19 | HLCOY89 | PTA-3980 | pCMVSport 6 | 29 | 903 | 1 | 903 | 103 | 103 | 211 | 1 | 19 | 20 | 234 |
| | | Jan. 14, 2002 | | | | | | | | | | | | |
| 20 | HLCPI67 | PTA-3980 | pCMVSport 6 | 30 | 1231 | 128 | 1231 | 172 | 172 | 212 | 1 | 18 | 19 | 116 |
| | | Jan. 14, 2002 | | | | | | | | | | | | |
| 21 | HCPRA19 | PTA-3980 | pCMVSport 3.0 | 31 | 2033 | 1283 | 2033 | 203 | 203 | 213 | 1 | 28 | 29 | 610 |
| | | Jan. 14, 2002 | | | | | | | | | | | | |
| 22 | HEFEN82 | PTA-3980 | pCMVSport 6 | 32 | 1456 | 360 | 1456 | 686 | 686 | 214 | 1 | 26 | 27 | 207 |
| | | Jan. 14, 2002 | | | | | | | | | | | | |
| 23 | HEELL43 | PTA-3980 | pCMVSport 6 | 33 | 536 | 1 | 536 | 135 | 135 | 215 | 1 | 33 | 34 | 134 |
| | | Jan. 14, 2002 | | | | | | | | | | | | |
| 23 | HEELL43 | PTA-3980 | pCMVSport 6 | 169 | 725 | 34 | 725 | | 469 | 351 | 1 | | | 4 |
| | | Jan. 14, 2002 | | | | | | | | | | | | |
| 24 | HLEFG68 | PTA-3980 | pCMVSport 6 | 34 | 775 | 91 | 775 | 124 | 124 | 216 | 1 | 20 | 21 | 184 |
| | | Jan. 14, 2002 | | | | | | | | | | | | |
| 25 | HERHL91 | PTA-3980 | pCMVSport 3.0 | 35 | 494 | 1 | 494 | 74 | 74 | 217 | 1 | 26 | 27 | 140 |
| | | Jan. 14, 2002 | | | | | | | | | | | | |
| 25 | HERHL91 | PTA-3980 | pCMVSport 3.0 | 170 | 923 | 121 | 923 | 193 | 193 | 352 | 1 | 26 | 27 | 146 |
| | | Jan. 14, 2002 | | | | | | | | | | | | |
| 25 | HERHL91 | PTA-3980 | pCMVSport 3.0 | 171 | 836 | 318 | 836 | | 250 | 353 | 1 | 8 | 9 | 67 |
| | | Jan. 14, 2002 | | | | | | | | | | | | |
| 26 | HEFFD22 | PTA-3980 | pCMVSport 6 | 36 | 503 | 1 | 503 | 45 | 45 | 218 | 1 | 28 | 29 | 100 |
| | | Jan. 14, 2002 | | | | | | | | | | | | |
| 27 | HPCCR42 | PTA-3980 | pCMVSport 3.0 | 37 | 1115 | 1 | 1115 | 169 | 169 | 219 | 1 | 16 | 17 | 278 |
| | | Jan. 14, 2002 | | | | | | | | | | | | |
| 28 | HECHI83 | PTA-3980 | pCMVSport 6 | 38 | 541 | 1 | 541 | 333 | 333 | 220 | 1 | 31 | 32 | 69 |
| | | Jan. 14, 2002 | | | | | | | | | | | | |
| 29 | HEFEL28 | PTA-3980 | pCMVSport 6 | 39 | 636 | 1 | 636 | 210 | 210 | 221 | 1 | 35 | 36 | 142 |
| | | Jan. 14, 2002 | | | | | | | | | | | | |
| 30 | HLCON84 | PTA-3980 | pCMVSport 6 | 40 | 1199 | 247 | 1199 | 417 | 417 | 222 | 1 | 20 | 21 | 106 |
| | | Jan. 14, 2002 | | | | | | | | | | | | |
| 31 | HLEFK80 | PTA-3980 | pCMVSport 6 | 41 | 393 | 1 | 393 | 95 | 95 | 223 | 1 | 20 | 21 | 99 |
| | | Jan. 14, 2002 | | | | | | | | | | | | |
| 32 | HLCPQ02 | PTA-3980 | pCMVSport 6 | 42 | 485 | 1 | 485 | 240 | 240 | 224 | 1 | 23 | 24 | 71 |
| | | Jan. 14, 2002 | | | | | | | | | | | | |
| 33 | HLEFR48 | PTA-3980 | pCMVSport 6 | 43 | 890 | 239 | 890 | 270 | 270 | 225 | 1 | 25 | 26 | 137 |
| | | Jan. 14, 2002 | | | | | | | | | | | | |
| 34 | HEFFA92 | PTA-3980 | pCMVSport 6 | 44 | 1029 | 81 | 1029 | 98 | 98 | 226 | 1 | 25 | 26 | 247 |
| | | Jan. 14, 2002 | | | | | | | | | | | | |
| 35 | HLEFF44 | PTA-3980 | pCMVSport 6 | 45 | 2560 | 1374 | 2560 | 1705 | 1705 | 227 | 1 | 27 | 28 | 120 |
| | | Jan. 14, 2002 | | | | | | | | | | | | |
| 36 | HLCOG83 | PTA-3980 | pCMVSport 6 | 46 | 342 | 1 | 342 | 28 | 28 | 228 | 1 | 22 | 23 | 97 |
| | | Jan. 14, 2002 | | | | | | | | | | | | |
| 37 | HLEFV31 | PTA-3980 | pCMVSport 6 | 47 | 499 | 1 | 499 | 80 | 80 | 229 | 1 | 35 | 36 | 140 |
| | | Jan. 14, 2002 | | | | | | | | | | | | |
| 38 | HLCOW38 | PTA-3980 | pCMVSport 6 | 48 | 538 | 1 | 538 | 56 | 56 | 230 | 1 | 49 | 50 | 161 |
| | | Jan. 14, 2002 | | | | | | | | | | | | |
| 39 | HEFEP03 | PTA-3980 | pCMVSport 6 | 49 | 1417 | 36 | 1417 | 239 | 239 | 231 | 1 | 45 | 46 | 155 |
| | | Jan. 14, 2002 | | | | | | | | | | | | |
| 40 | HEFFD82 | PTA-3980 | pCMVSport 6 | 50 | 1127 | 186 | 1127 | 247 | 247 | 232 | 1 | 20 | 21 | 189 |
| | | Jan. 14, 2002 | | | | | | | | | | | | |
| 41 | HECHH44 | PTA-3980 | pCMVSport 6 | 51 | 843 | 1 | 843 | 60 | 60 | 233 | 1 | 18 | 19 | 261 |
| | | Jan. 14, 2002 | | | | | | | | | | | | |
| 42 | HLEGA47 | PTA-3980 | pCMVSport 6 | 52 | 409 | 1 | 409 | 49 | 49 | 234 | 1 | 41 | 42 | 120 |
| | | Jan. 14, 2002 | | | | | | | | | | | | |
| 43 | HEDBJ79 | PTA-3980 | pCMVSport 6 | 53 | 2351 | 1400 | 2351 | 1705 | 1705 | 235 | 1 | 27 | 28 | 120 |
| | | Jan. 14, 2002 | | | | | | | | | | | | |
| 44 | HEEML62 | PTA-3980 | pCMVSport 6 | 54 | 1313 | 19 | 1313 | 27 | 27 | 236 | 1 | 20 | 21 | 298 |
| | | Jan. 14, 2002 | | | | | | | | | | | | |
| 45 | HEELB16 | PTA-3980 | pCMVSport 6 | 55 | 1948 | 292 | 1948 | 545 | 545 | 237 | 1 | 20 | 21 | 364 |
| | | Jan. 14, 2002 | | | | | | | | | | | | |
| 46 | HEDBH12 | PTA-3980 | pCMVSport 6 | 56 | 258 | 1 | 258 | 47 | 47 | 238 | 1 | 26 | 27 | 70 |
| | | Jan. 14, 2002 | | | | | | | | | | | | |
| 47 | HABDM96 | PTA-3980 | pCMVSport 3.0 | 57 | 498 | 1 | 498 | 3 | 3 | 239 | 1 | 19 | 20 | 110 |
| | | Jan. 14, 2002 | | | | | | | | | | | | |
| 48 | HPCBB59 | PTA-3980 | pCMVSport 3.0 | 58 | 385 | 1 | 385 | 5 | 5 | 240 | 1 | 16 | 17 | 127 |
| | | Jan. 14, 2002 | | | | | | | | | | | | |
| 49 | HERHD36 | PTA-3845 | pCMVSport 3.0 | 59 | 627 | 233 | 627 | 444 | 444 | 241 | 1 | 24 | 25 | 61 |
| | | Nov. 08, 2001 | | | | | | | | | | | | |
| 50 | HIGAT21 | PTA-3980 | pCMVSport 3.0 | 60 | 887 | 1 | 887 | 16 | 16 | 242 | 1 | 20 | 21 | 183 |
| | | Jan. 14, 2002 | | | | | | | | | | | | |
| 50 | HIGAT21 | PTA-3980 | pCMVSport 3.0 | 172 | 654 | 1 | 654 | 16 | 16 | 354 | 1 | 20 | 21 | 173 |
| | | Jan. 14, 2002 | | | | | | | | | | | | |
| 51 | HIGBG18 | PTA-3980 | pCMVSport 3.0 | 61 | 1141 | 1 | 1141 | 71 | 71 | 243 | 1 | 20 | 21 | 217 |
| | | Jan. 14, 2002 | | | | | | | | | | | | |
| 52 | HIGBQ67 | PTA-3980 | pCMVSport 3.0 | 62 | 1187 | 68 | 1187 | 71 | 71 | 244 | 1 | 24 | 25 | 288 |
| | | Jan. 14, 2002 | | | | | | | | | | | | |
| 53 | HPNCW15 | PTA-3980 | pCMVSport 3.0 | 63 | 425 | 23 | 425 | 37 | 37 | 245 | 1 | 17 | 18 | 71 |
| | | Jan. 14, 2002 | | | | | | | | | | | | |
| 54 | HIGAT76 | PTA-3980 | pCMVSport 3.0 | 64 | 536 | 1 | 536 | 21 | 21 | 246 | 1 | 17 | 18 | 112 |
| | | Jan. 14, 2002 | | | | | | | | | | | | |
| 55 | HPNCC51 | PTA-3980 | pCMVSport 3.0 | 65 | 725 | 103 | 725 | 107 | 107 | 247 | 1 | 48 | 49 | 180 |
| | | Jan. 14, 2002 | | | | | | | | | | | | |
| 56 | HIGBR51 | PTA-3980 | pCMVSport 3.0 | 66 | 467 | 1 | 467 | 5 | 5 | 248 | 1 | 20 | 21 | 154 |
| | | Jan. 14, 2002 | | | | | | | | | | | | |
| 57 | HECHQ69 | PTA-4103 | pCMVSport 6 | 67 | 690 | 58 | 637 | 93 | 93 | 249 | 1 | 16 | 17 | 134 |
| | | Feb. 26, 2002 | | | | | | | | | | | | |
| 58 | HECJN68 | PTA-4103 | pCMVSport 6 | 68 | 937 | 1 | 865 | 174 | 174 | 250 | 1 | 39 | 40 | 254 |
| | | Feb. 26, 2002 | | | | | | | | | | | | |
| 59 | HEFJO40 | PTA-4103 | pCMVSport 6 | 69 | 2379 | 1 | 2379 | 100 | 100 | 251 | 1 | 18 | 19 | 347 |
| | | Feb. 26, 2002 | | | | | | | | | | | | |
| 60 | HEGLK47 | PTA-4103 | pCMVSport 6 | 70 | 1238 | 1 | 1238 | 24 | 24 | 252 | 1 | 35 | 36 | 347 |
| | | Feb. 26, 2002 | | | | | | | | | | | | |
| 61 | HEDDJ18 | PTA-4103 | pCMVSport 6 | 71 | 1234 | 1 | 1234 | 91 | 91 | 253 | 1 | 23 | 24 | 170 |
| | | Feb. 26, 2002 | | | | | | | | | | | | |
| 62 | HEGLA38 | PTA-4103 | pCMVSport 6 | 72 | 891 | 1 | 891 | 17 | 17 | 254 | 1 | 21 | 22 | 291 |
| | | Feb. 26, 2002 | | | | | | | | | | | | |
| 63 | HEHXT39 | PTA-4103 | pCMVSport 6 | 73 | 629 | 1 | 605 | 19 | 19 | 255 | 1 | 22 | 23 | 97 |
| | | Feb. 26, 2002 | | | | | | | | | | | | |
| 64 | HMFHI61 | PTA-4103 | pCMVSport 6 | 74 | 1181 | 1 | 1181 | 59 | 59 | 256 | 1 | 18 | 19 | 338 |
| | | Feb. 26, 2002 | | | | | | | | | | | | |
| 65 | HEHNH91 | PTA-4103 | pCMVSport 6 | 75 | 643 | 1 | 643 | 17 | 17 | 257 | 1 | 25 | 26 | 209 |
| | | Feb. 26, 2002 | | | | | | | | | | | | |
| 66 | HECJZ49 | PTA-4103 | pCMVSport 6 | 76 | 1032 | 1 | 1032 | 76 | 76 | 258 | 1 | 18 | 19 | 313 |
| | | Feb. 26, 2002 | | | | | | | | | | | | |
| 67 | HPCCR42 | PTA-4103 | pCMVSport 3.0 | 77 | 1115 | 1 | 1115 | 169 | 169 | 259 | 1 | 16 | 17 | 278 |
| | | Feb. 26, 2002 | | | | | | | | | | | | |
| 68 | HECHP58 | PTA-4103 | pCMVSport 6 | 78 | 486 | 1 | 486 | 48 | 48 | 260 | 1 | 20 | 21 | 104 |
| | | Feb. 26, 2002 | | | | | | | | | | | | |
| 69 | HEFGF49 | PTA-4103 | pCMVSport 6 | 79 | 1057 | 21 | 1057 | 197 | 197 | 261 | 1 | 31 | 32 | 208 |
| | | Feb. 26, 2002 | | | | | | | | | | | | |
| 70 | HEFJI37 | PTA-4103 | pCMVSport 6 | 80 | 1449 | 52 | 562 | 189 | 189 | 262 | 1 | 18 | 19 | 240 |
| | | Feb. 26, 2002 | | | | | | | | | | | | |
| 71 | HEDCP16 | PTA-4103 | pCMVSport 6 | 81 | 569 | 1 | 569 | 42 | 42 | 263 | 1 | 22 | 23 | 119 |
| | | Feb. 26, 2002 | | | | | | | | | | | | |
| 72 | HECJR25 | PTA-4103 | pCMVSport 6 | 82 | 903 | 315 | 888 | 350 | 350 | 264 | 1 | 16 | 17 | 134 |
| | | Feb. 26, 2002 | | | | | | | | | | | | |
| 73 | HEEMT12 | PTA-4103 | pCMVSport 6 | 83 | 623 | 1 | 623 | 33 | 33 | 265 | 1 | 22 | 23 | 97 |
| | | Feb. 26, 2002 | | | | | | | | | | | | |
| 74 | HECHX69 | PTA-4103 | pCMVSport 6 | 84 | 795 | 76 | 795 | 188 | 188 | 266 | 1 | 21 | 22 | 186 |
| | | Feb. 26, 2002 | | | | | | | | | | | | |
| 75 | HEGLP63 | PTA-4103 | pCMVSport 6 | 85 | 807 | 1 | 807 | 17 | 17 | 267 | 1 | 22 | 23 | 97 |
| | | Feb. 26, 2002 | | | | | | | | | | | | |
| 76 | HEFIA60 | PTA-4103 | pCMVSport 6 | 86 | 681 | 1 | 681 | 279 | 279 | 268 | 1 | 26 | 27 | 77 |
| | | Feb. 26, 2002 | | | | | | | | | | | | |
| 77 | HEFID84 | PTA-4103 | pCMVSport 6 | 87 | 1142 | 114 | 856 | 143 | 143 | 269 | 1 | 48 | 49 | 180 |
| | | Feb. 26, 2002 | | | | | | | | | | | | |
| 78 | HEHXR32 | PTA-4103 | pCMVSport 6 | 88 | 2135 | 831 | 2135 | 1018 | 1018 | 270 | 1 | 35 | 36 | 263 |
| | | Feb. 26, 2002 | | | | | | | | | | | | |
| 79 | HMFHW53 | PTA-4103 | pCMVSport 6 | 89 | 649 | 1 | 649 | 107 | 107 | 271 | 1 | 21 | 22 | 149 |
| | | Feb. 26, 2002 | | | | | | | | | | | | |
| 80 | HEDCZ72 | PTA-4103 | pCMVSport 6 | 90 | 1501 | 1 | 1501 | 255 | 255 | 272 | 1 | 22 | 23 | 110 |
| | | Feb. 26, 2002 | | | | | | | | | | | | |
| 81 | HECKQ42 | PTA-4103 | pCMVSport 6 | 91 | 587 | 1 | 587 | 22 | 22 | 273 | 1 | 22 | 23 | 97 |
| | | Feb. 26, 2002 | | | | | | | | | | | | |
| 82 | HEHXJ43 | PTA-4103 | pCMVSport 6 | 92 | 692 | 1 | 692 | 20 | 20 | 274 | 1 | 25 | 26 | 169 |
| | | Feb. 26, 2002 | | | | | | | | | | | | |
| 83 | HECKS63 | PTA-4103 | pCMVSport 6 | 93 | 877 | 1 | 877 | 74 | 74 | 275 | 1 | 20 | 21 | 189 |
| | | Feb. 26, 2002 | | | | | | | | | | | | |
| 84 | HEDEQ16 | PTA-4103 | pCMVSport 6 | 94 | 976 | 1 | 976 | 21 | 21 | 276 | 1 | 48 | 49 | 180 |
| | | Feb. 26, 2002 | | | | | | | | | | | | |
| 85 | HEENI83 | PTA-4103 | pCMVSport 6 | 95 | 986 | 1 | 986 | 51 | 51 | 277 | 1 | 48 | 49 | 180 |
| | | Feb. 26, 2002 | | | | | | | | | | | | |
| 86 | HMFHN24 | PTA-4103 | pCMVSport 6 | 96 | 1927 | 38 | 1927 | 250 | 250 | 278 | 1 | 15 | 16 | 354 |
| | | Feb. 26, 2002 | | | | | | | | | | | | |
| 87 | HMFHX66 | PTA-4103 | pCMVSport 6 | 97 | 4393 | 2288 | 4393 | 2697 | 2697 | 279 | 1 | 21 | 22 | 95 |
| | | Feb. 26, 2002 | | | | | | | | | | | | |
| 88 | HEENV67 | PTA-4103 | pCMVSport 6 | 98 | 1192 | 36 | 1192 | 138 | 138 | 280 | 1 | 28 | 29 | 245 |
| | | Feb. 26, 2002 | | | | | | | | | | | | |
| 89 | HECIB71 | PTA-4103 | pCMVSport 6 | 99 | 1230 | 1 | 1230 | 80 | 80 | 281 | 1 | 21 | 22 | 383 |
| | | Feb. 26, 2002 | | | | | | | | | | | | |
| 90 | HEHNE29 | PTA-4103 | pCMVSport 6 | 100 | 1058 | 1 | 1058 | 73 | 73 | 282 | 1 | 18 | 19 | 328 |
| | | Feb. 26, 2002 | | | | | | | | | | | | |
| 91 | HEHXS16 | PTA-4103 | pCMVSport 6 | 101 | 749 | 1 | 749 | 36 | 36 | 283 | 1 | 48 | 49 | 199 |
| | | Feb. 26, 2002 | | | | | | | | | | | | |
| 92 | HEDDB56 | PTA-4103 | pCMVSport 6 | 102 | 569 | 1 | 569 | 42 | 42 | 284 | 1 | 22 | 23 | 119 |
| | | Feb. 26, 2002 | | | | | | | | | | | | |
| 93 | HEENK36 | PTA-4103 | pCMVSport 6 | 103 | 1273 | 1 | 1273 | 269 | 269 | 285 | 1 | 20 | 21 | 90 |
| | | Feb. 26, 2002 | | | | | | | | | | | | |
| 94 | HMFHT07 | PTA-4103 | pCMVSport 6 | 104 | 681 | 1 | 681 | 180 | 180 | 286 | 1 | 47 | 48 | 138 |
| | | Feb. 26, 2002 | | | | | | | | | | | | |
| 95 | HNEMX81 | PTA-4103 | pCMVSport 6 | 105 | 1695 | 1 | 1489 | 37 | 37 | 287 | 1 | 38 | 39 | 153 |
| | | Feb. 26, 2002 | | | | | | | | | | | | |
| 96 | HIGBR51 | PTA-4103 | pCMVSport 3.0 | 106 | 467 | 1 | 467 | 5 | 5 | 288 | 1 | 20 | 21 | 154 |
| | | Feb. 26, 2002 | | | | | | | | | | | | |
| 97 | HECKK69 | PTA-4103 | pCMVSport 6 | 107 | 572 | 1 | 572 | 19 | 19 | 289 | 1 | 22 | 23 | 97 |
| | | Feb. 26, 2002 | | | | | | | | | | | | |
| 98 | HEDEY26 | PTA-4103 | pCMVSport 6 | 108 | 1214 | 164 | 761 | 233 | 233 | 290 | 1 | 22 | 23 | 119 |
| | | Feb. 26, 2002 | | | | | | | | | | | | |
| 99 | HEFHJ61 | PTA-4103 | pCMVSport 6 | 109 | 1647 | 16 | 1647 | 37 | 37 | 291 | 1 | 44 | 45 | 356 |
| | | Feb. 26, 2002 | | | | | | | | | | | | |
| 100 | HEHXH94 | PTA-4103 | pCMVSport 6 | 110 | 605 | 1 | 605 | 170 | 170 | 292 | 1 | 27 | 28 | 87 |
| | | Feb. 26, 2002 | | | | | | | | | | | | |
| 101 | HEFHC80 | PTA-4103 | pCMVSport 6 | 111 | 956 | 1 | 956 | 26 | 26 | 293 | 1 | 24 | 25 | 288 |
| | | Feb. 26, 2002 | | | | | | | | | | | | |
| 102 | HEDEJ55 | PTA-4103 | pCMVSport 6 | 112 | 1178 | 1 | 1178 | 96 | 96 | 294 | 1 | 18 | 19 | 204 |
| | | Feb. 26, 2002 | | | | | | | | | | | | |
| 103 | HEEMW15 | PTA-4103 | pCMVSport 6 | 113 | 1041 | 1 | 1041 | 101 | 101 | 295 | 1 | 22 | 23 | 158 |
| | | Feb. 26, 2002 | | | | | | | | | | | | |
| 104 | HMFIH88 | PTA-4103 | pCMVSport 6 | 114 | 729 | 1 | 729 | 42 | 42 | 296 | 1 | 34 | 35 | 229 |
| | | Feb. 26, 2002 | | | | | | | | | | | | |
| 105 | HEFJN45 | PTA-4103 | pCMVSport 6 | 115 | 495 | 1 | 495 | 308 | 308 | 297 | 1 | 30 | 31 | 62 |
| | | Feb. 26, 2002 | | | | | | | | | | | | |
| 105 | HEFJN45 | PTA-4103 | pCMVSport 6 | 173 | 1230 | 338 | 1230 | 644 | 644 | 355 | 1 | 30 | 31 | 69 |
| | | Feb. 26, 2002 | | | | | | | | | | | | |
| 106 | HEFKA79 | PTA-4103 | pCMVSport 6 | 116 | 1701 | 1 | 1701 | 46 | 46 | 298 | 1 | 35 | 36 | 177 |
| | | Feb. 26, 2002 | | | | | | | | | | | | |
| 107 | HEGLH36 | PTA-4103 | pCMVSport 6 | 117 | 410 | 1 | 410 | 34 | 34 | 299 | 1 | 26 | 27 | 125 |
| | | Feb. 26, 2002 | | | | | | | | | | | | |
| 108 | HMFHX51 | PTA-4103 | pCMVSport 6 | 118 | 980 | 1 | 980 | 18 | 18 | 300 | 1 | 48 | 49 | 180 |
| | | Feb. 26, 2002 | | | | | | | | | | | | |
| 109 | HEIDS26 | PTA-4103 | pCMVSport 6 | 119 | 859 | 1 | 859 | 132 | 132 | 301 | 1 | 49 | 50 | 100 |
| | | Feb. 26, 2002 | | | | | | | | | | | | |
| 110 | HMFHL01 | PTA-4103 | pCMVSport 6 | 120 | 444 | 1 | 444 | 32 | 32 | 302 | 1 | 26 | 27 | 137 |
| | | Feb. 26, 2002 | | | | | | | | | | | | |
| 111 | HECKQ90 | PTA-4103 | pCMVSport 6 | 121 | 1244 | 1 | 1244 | 14 | 14 | 303 | 1 | 19 | 20 | 70 |
| | | Feb. 26, 2002 | | | | | | | | | | | | |
| 112 | HEIDA30 | PTA-4103 | pCMVSport 6 | 122 | 764 | 1 | 764 | 105 | 105 | 304 | 1 | 19 | 20 | 145 |
| | | Feb. 26, 2002 | | | | | | | | | | | | |
| 113 | HEDDM74 | PTA-4103 | pCMVSport 6 | 123 | 743 | 1 | 709 | 320 | 320 | 305 | 1 | 26 | 27 | 112 |
| | | Feb. 26, 2002 | | | | | | | | | | | | |
| 114 | HEHXC34 | PTA-4103 | pCMVSport 6 | 124 | 478 | 3 | 444 | 28 | 28 | 306 | 1 | 22 | 23 | 99 |
| | | Feb. 26, 2002 | | | | | | | | | | | | |
| 115 | HEHXL26 | PTA-4103 | pCMVSport 6 | 125 | 972 | 1 | 972 | 17 | 17 | 307 | 1 | 25 | 26 | 318 |
| | | Feb. 26, 2002 | | | | | | | | | | | | |
| 116 | HEENT17 | PTA-4103 | pCMVSport 6 | 126 | 561 | 6 | 561 | 265 | 265 | 308 | 1 | 40 | 41 | 84 |
| | | Feb. 26, 2002 | | | | | | | | | | | | |
| 117 | HEFHB48 | PTA-4103 | pCMVSport 6 | 127 | 1433 | 648 | 1242 | 720 | 720 | 309 | 1 | 36 | 37 | 86 |
| | | Feb. 26, 2002 | | | | | | | | | | | | |
| 117 | HEFHB48 | PTA-4103 | pCMVSport 6 | 174 | 909 | 1 | 909 | | 23 | 356 | 1 | 35 | 36 | 59 |
| | | Feb. 26, 2002 | | | | | | | | | | | | |
| 118 | HEFIF14 | PTA-4103 | pCMVSport 6 | 128 | 855 | 1 | 855 | 38 | 38 | 310 | 1 | 27 | 28 | 134 |
| | | Feb. 26, 2002 | | | | | | | | | | | | |
| 119 | HNEMX50 | PTA-4103 | pCMVSport 6 | 129 | 501 | 1 | 501 | 311 | 311 | 311 | 1 | 21 | 22 | 62 |
| | | Feb. 26, 2002 | | | | | | | | | | | | |
| 120 | HEFJJ04 | PTA-4103 | pCMVSport 6 | 130 | 1180 | 1 | 1180 | 312 | 312 | 312 | 1 | 21 | 22 | 259 |
| | | Feb. 26, 2002 | | | | | | | | | | | | |
| 121 | HEHXW79 | PTA-4103 | pCMVSport 6 | 131 | 397 | 7 | 396 | 19 | 19 | 313 | 1 | 22 | 23 | 85 |
| | | Feb. 26, 2002 | | | | | | | | | | | | |
| 122 | HEHMJ47 | PTA-4103 | pCMVSport 6 | 132 | 1013 | 335 | 1013 | 374 | 374 | 314 | 1 | 24 | 25 | 189 |
| | | Feb. 26, 2002 | | | | | | | | | | | | |
| 123 | HRCRE68 | PTA-4103 | pCMVSport 6 | 133 | 5747 | 2106 | 2471 | 2277 | 2277 | 315 | 1 | 20 | 21 | 60 |
| | | Feb. 26, 2002 | | | | | | | | | | | | |
| 124 | HMFHV45 | PTA-4103 | pCMVSport 6 | 134 | 1262 | 1 | 1262 | 280 | 280 | 316 | 1 | 32 | 33 | 114 |
| | | Feb. 26, 2002 | | | | | | | | | | | | |
| 125 | HECJZ57 | PTA-4103 | pCMVSport 6 | 135 | 3279 | 855 | 3279 | 182 | 182 | 317 | 1 | 1 | 2 | 625 |
| | | Feb. 26, 2002 | | | | | | | | | | | | |
| 125 | HECJZ57 | PTA-4103 | pCMVSport 6 | 175 | 942 | 525 | 934 | | 3 | 357 | 1 | 1 | 2 | 65 |
| | | Feb. 26, 2002 | | | | | | | | | | | | |
| 126 | HEFJW14 | PTA-4103 | pCMVSport 6 | 136 | 2394 | 570 | 2394 | 622 | 622 | 318 | 1 | 27 | 28 | 68 |
| | | Feb. 26, 2002 | | | | | | | | | | | | |
| 127 | HMFHC03 | PTA-4103 | pCMVSport 6 | 137 | 614 | 1 | 614 | 358 | 358 | 319 | 1 | 21 | 22 | 85 |
| | | Feb. 26, 2002 | | | | | | | | | | | | |
| 127 | HMFHC03 | PTA-4103 | pCMVSport 6 | 176 | 1778 | 535 | 585 | | 366 | 358 | 1 | 1 | 2 | 150 |
| | | Feb. 26, 2002 | | | | | | | | | | | | |
| 127 | HMFHC03 | PTA-4103 | pCMVSport 6 | 177 | 1600 | 720 | 1600 | 617 | 617 | 359 | 1 | 21 | 22 | 268 |
| | | Feb. 26, 2002 | | | | | | | | | | | | |
| 128 | HMFHE73 | PTA-4103 | pCMVSport 6 | 138 | 1861 | 1035 | 1861 | 1098 | 1098 | 320 | 1 | 28 | 29 | 254 |
| | | Feb. 26, 2002 | | | | | | | | | | | | |
| 128 | HMFHE73 | PTA-4103 | pCMVSport 6 | 178 | 1388 | 66 | 1388 | 29 | 29 | 360 | 1 | 28 | 29 | 347 |
| | | Feb. 26, 2002 | | | | | | | | | | | | |
| 129 | HECKH20 | PTA-4103 | pCMVSport 6 | 139 | 903 | 315 | 903 | 350 | 350 | 321 | 1 | 16 | 17 | 134 |
| | | Feb. 26, 2002 | | | | | | | | | | | | |
| 130 | HMFHH91 | PTA-4103 | pCMVSport 6 | 140 | 1198 | 449 | 1198 | 517 | 517 | 322 | 1 | 34 | 35 | 219 |
| | | Feb. 26, 2002 | | | | | | | | | | | | |
| 131 | HMFIH13 | PTA-4103 | pCMVSport 6 | 141 | 1926 | 240 | 1926 | 652 | 652 | 323 | 1 | 37 | 38 | 112 |
| | | Feb. 26, 2002 | | | | | | | | | | | | |
| 132 | HTLRZ23 | PTA-4609 | pCMVSport 6 | 142 | 738 | 34 | 738 | 303 | 303 | 324 | 1 | 20 | 21 | 145 |
| | | Aug. 22, 2002 | | | | | | | | | | | | |
| 133 | HECKK69 | PTA-4609 | pCMVSport 6 | 143 | 670 | 1 | 670 | 21 | 21 | 325 | 1 | 22 | 23 | 97 |
| | | Aug. 22, 2002 | | | | | | | | | | | | |
| 133 | HECKK69 | PTA-4609 | pCMVSport 6 | 179 | 666 | 1 | 666 | 19 | 19 | 361 | 1 | 22 | 23 | 97 |
| | | Aug. 22, 2002 | | | | | | | | | | | | |
| 134 | HTLRO18 | PTA-4609 | pCMVSport 6 | 144 | 631 | 1 | 631 | 151 | 151 | 326 | 1 | 19 | 20 | 160 |
| | | Aug. 22, 2002 | | | | | | | | | | | | |
| 135 | HDPXG11 | PTA-4609 | pCMVSport 3.0 | 145 | 2049 | 48 | 2049 | 52 | 52 | 327 | 1 | 31 | 32 | 220 |
| | | Aug. 22, 2002 | | | | | | | | | | | | |
| 136 | HGTMQ07 | PTA-4609 | pCMVSport 6 | 146 | 975 | 1 | 975 | 90 | 90 | 328 | 1 | 20 | 21 | 130 |
| | | Aug. 22, 2002 | | | | | | | | | | | | |
| 137 | HRDHH73 | PTA-4609 | pCMVSport 6 | 147 | 2335 | 228 | 2335 | 249 | 249 | 329 | 1 | 22 | 23 | 576 |
| | | Aug. 22, 2002 | | | | | | | | | | | | |
| 138 | HRCSY77 | PTA-4609 | pCMVSport 6 | 148 | 614 | 1 | 614 | 165 | 165 | 330 | 1 | 19 | 20 | 89 |
| | | Aug. 22, 2002 | | | | | | | | | | | | |
| 139 | HKVBG77 | PTA-4609 | pCMVSport 6 | 149 | 2082 | 1 | 2082 | 93 | 93 | 331 | 1 | 21 | 22 | 490 |
| | | Aug. 22, 2002 | | | | | | | | | | | | |
| 140 | HXDCQ39 | PTA-4609 | pCMVSport 6 | 150 | 1362 | 516 | 1362 | 528 | 528 | 332 | 1 | 24 | 25 | 151 |
| | | Aug. 22, 2002 | | | | | | | | | | | | |
| 141 | HECHZ42 | PTA-4609 | pCMVSport 6 | 151 | 2012 | 1 | 2012 | 37 | 37 | 333 | 1 | 17 | 18 | 341 |
| | | Aug. 22, 2002 | | | | | | | | | | | | |
| 142 | HGTJD50 | PTA-4609 | pCMVSport 6 | 152 | 1121 | 1 | 1121 | 180 | 180 | 334 | 1 | 20 | 21 | 310 |
| | | Aug. 22, 2002 | | | | | | | | | | | | |
| 143 | HEDDB56 | PTA-4609 | pCMVSport 6 | 153 | 573 | 1 | 573 | 44 | 44 | 335 | 1 | 22 | 23 | 119 |
| | | Aug. 22, 2002 | | | | | | | | | | | | |
| 143 | HEDDB56 | PTA-4609 | pCMVSport 6 | 180 | 750 | 1 | 569 | 42 | 42 | 362 | 1 | 22 | 23 | 119 |
| | | Aug. 22, 2002 | | | | | | | | | | | | |
| 144 | HECHS69 | PTA-4609 | pCMVSport 6 | 154 | 1010 | 1 | 1010 | 21 | 21 | 336 | 1 | 25 | 26 | 247 |
| | | Aug. 22, 2002 | | | | | | | | | | | | |
| 144 | HECHS69 | PTA-4609 | pCMVSport 6 | 181 | 644 | 1 | 644 | 19 | 19 | 363 | 1 | 25 | 26 | 208 |
| | | Aug. 22, 2002 | | | | | | | | | | | | |
| 145 | HEFIA60 | PTA-4609 | pCMVSport 6 | 155 | 687 | 1 | 687 | 281 | 281 | 337 | 1 | 26 | 27 | 86 |
| | | Aug. 22, 2002 | | | | | | | | | | | | |
| 145 | HEFIA60 | PTA-4609 | pCMVSport 6 | 182 | 681 | 1 | 681 | 279 | 279 | 364 | 1 | 26 | 27 | 77 |
| | | Aug. 22, 2002 | | | | | | | | | | | | |
| 145 | HEFIA60 | PTA-4609 | pCMVSport 6 | 183 | 692 | 1 | 692 | 285 | 285 | 365 | 1 | 26 | 27 | 86 |
| | | Aug. 22, 2002 | | | | | | | | | | | | |
| 146 | HEFIF14 | PTA-4609 | pCMVSport 6 | 156 | 1386 | 1 | 1386 | 38 | 38 | 338 | 1 | 27 | 28 | 134 |
| | | Aug. 22, 2002 | | | | | | | | | | | | |
| 146 | HEFIF14 | PTA-4609 | pCMVSport 6 | 184 | 1418 | 386 | 1418 | | 558 | 366 | 1 | | | 7 |
| | | Aug. 22, 2002 | | | | | | | | | | | | |
| 147 | HEDCP16 | PTA-4609 | pCMVSport 6 | 157 | 569 | 1 | 569 | 42 | 42 | 339 | 1 | 22 | 23 | 119 |
| | | Aug. 22, 2002 | | | | | | | | | | | | |
| 148 | HEDEX64 | PTA-4609 | pCMVSport 6 | 158 | 574 | 1 | 574 | 177 | 177 | 340 | 1 | 39 | 40 | 90 |
| | | Aug. 22, 2002 | | | | | | | | | | | | |
| 148 | HEDEX64 | PTA-4609 | pCMVSport 6 | 185 | 552 | 296 | 552 | 157 | 157 | 367 | 1 | 39 | 40 | 90 |
| | | Aug. 22, 2002 | | | | | | | | | | | | |
| 148 | HEDEX64 | PTA-4609 | pCMVSport 6 | 186 | 528 | 1 | 528 | 175 | 175 | 368 | 1 | 39 | 40 | 90 |
| | | Aug. 22, 2002 | | | | | | | | | | | | |
| 149 | HDPAV18 | PTA-4609 | pCMVSport 3.0 | 159 | 1645 | 83 | 1645 | 124 | 124 | 341 | 1 | 38 | 39 | 187 |
| | | Aug. 22, 2002 | | | | | | | | | | | | |
| 149 | HDPAV18 | PTA-4609 | pCMVSport 3.0 | 187 | 429 | 1 | 429 | | 108 | 369 | 1 | 1 | 2 | 66 |
| | | Aug. 22, 2002 | | | | | | | | | | | | |
| 150 | HECKQ42 | PTA-4609 | pCMVSport 6 | 160 | 587 | 1 | 587 | 22 | 22 | 342 | 1 | 22 | 23 | 97 |
| | | Aug. 22, 2002 | | | | | | | | | | | | |
| 150 | HECKQ42 | PTA-4609 | pCMVSport 6 | 188 | 622 | 1 | 622 | 7 | 7 | 370 | 1 | 22 | 23 | 97 |
| | | Aug. 22, 2002 | | | | | | | | | | | | |
| 150 | HECKQ42 | PTA-4609 | pCMVSport 6 | 189 | 634 | 1 | 634 | 22 | 22 | 371 | 1 | 22 | 23 | 97 |
| | | Aug. 22, 2002 | | | | | | | | | | | | |
| 151 | HGTLT88 | PTA-4609 | pCMVSport 6 | 161 | 1193 | 359 | 1193 | 540 | 540 | 343 | 1 | 30 | 31 | 89 |
| | | Aug. 22, 2002 | | | | | | | | | | | | |
| 151 | HGTLT88 | PTA-4609 | pCMVSport 6 | 190 | 900 | 725 | 882 | | 129 | 372 | 1 | 1 | 2 | 64 |
| | | Aug. 22, 2002 | | | | | | | | | | | | |
| 152 | HRCSG16 | PTA-4609 | pCMVSport 6 | 162 | 563 | 1 | 563 | 245 | 245 | 344 | 1 | 19 | 20 | 90 |
| | | Aug. 22, 2002 | | | | | | | | | | | | |
| 153 | HQQBQ63 | PTA-4609 | pCMVSport 3.0 | 163 | 810 | 1 | 810 | 228 | 228 | 345 | 1 | 21 | 22 | 194 |
| | | Aug. 22, 2002 | | | | | | | | | | | | |
| 154 | HRDIJ66 | PTA-4609 | pCMVSport 6 | 164 | 2267 | 1 | 2267 | 108 | 108 | 346 | 1 | 22 | 23 | 335 |
| | | Aug. 22, 2002 | | | | | | | | | | | | |
| 155 | HRDKC71 | PTA-4609 | pCMVSport 6 | 165 | 735 | 11 | 735 | 23 | 23 | 347 | 1 | 20 | 21 | 209 |
| | | Aug. 22, 2002 | | | | | | | | | | | | |
| 156 | HQQDK22 | PTA-4609 | pCMVSport 3.0 | 166 | 4355 | 46 | 4355 | 273 | 273 | 348 | 1 | 21 | 22 | 244 |
| | | Aug. 22, 2002 | | | | | | | | | | | | |
| 157 | HCBOG68 | PTA-4609 | pSport1 | 167 | 705 | 1 | 705 | 31 | 31 | 349 | 1 | 20 | 21 | 151 |
| | | Aug. 22, 2002 | | | | | | | | | | | | |
| 157 | HCBOG68 | PTA-4609 | pSport1 | 191 | 757 | 446 | 757 | 112 | 112 | 373 | 1 | 20 | 21 | 142 |
| | | Aug. 22, 2002 | | | | | | | | | | | | |
| 157 | HCBOG68 | PTA-4609 | pSport1 | 192 | 618 | 19 | 618 | 38 | 38 | 374 | 1 | 20 | 21 | 151 |
| | | Aug. 22, 2002 | | | | | | | | | | | | |

[1009] Description of Table 1B

[1010] Table 1B summarizes some of the polynucleotides encompassed by the invention (including cDNA clones related to the sequences (Clone ID:), contig sequences (contig identifier (Contig ID:) and contig nucleotide sequence identifiers (SEQ ID NO:X)) and further summarizes certain characteristics of these polynucleotides and the polypeptides encoded thereby.

[1011] The first column of Table 1B provide the gene numbers in the application for each clone identifier.

[1012] The second column of Table 1B provide unique clone identifiers, “Clone ID:”, for cDNA clones related to each contig sequence disclosed in Table 1A and/or Table 1B. This Clone ID references the cDNA clone which contains at least the 5′ most sequence of the assembled contig and at least a portion of SEQ ID NO:X as determined by directly sequencing the referenced clone. The referenced clone may have more sequence than described in the sequence listing or the clone may have less. In the vast majority of cases, however, the clone is believed to encode a full-length polypeptide. In the case where a clone is not full-length, a full-length cDNA can be obtained by methods described elsewhere herein.

[1013] The third column of Table 1B provide unique contig identifiers, “Contig ID:” for each of the contig sequences disclosed in these tables.

[1014] The fourth column of Table 1B provides the sequence identifiers, “SEQ ID NO:X”, for each of the contig sequences disclosed in Table 1A and/or 1B.

[1015] The fifth column of Table 1B, “ORF (From-To)”, provides the location (i.e., nucleotide position numbers) within the polynucleotide sequence of SEQ ID NO:X that delineates the preferred open reading frame (ORF) that encodes the amino acid sequence shown in the sequence listing and referenced in Table 1B as SEQ ID NO:Y (column 6). Where the nucleotide position number “To” is lower than the nucleotide position number “From”, the preferred ORF is the reverse complement of the referenced polynucleotide sequence.

[1016] The sixth column in Table 1B provides the corresponding SEQ ID NO:Y for the polypeptide sequence encoded by the preferred ORF delineated in column 5. In one embodiment, the invention provides an amino acid sequence comprising, or alternatively consisting of, a polypeptide encoded by the portion of SEQ ID NO:X delineated by “ORF (From-To)”. Also provided are polynucleotides encoding such amino acid sequences and the complementary strand thereto.

[1017] Column 7 of Table 1B lists residues comprising predicted epitopes contained in the polypeptides encoded by each of the preferred ORFs (SEQ ID NO:Y). Identification of potential immunogenic regions was performed according to the method of Jameson and Wolf (CABIOS, 4; 181-186 (1988)); specifically, the Genetics Computer Group (GCG) implementation of this algorithm, embodied in the program PEPTIDESTRUCTURE (Wisconsin Package vi 0.0, Genetics Computer Group (GCG), Madison, Wisc.) The Jameson-Wolf antigenic analysis was performed using the computer program PROTEAN (Version 3.11 for the Power MacIntosh, DNASTAR, Inc., 1228 South Park Street Madison, Wis.). This method returns a measure of the probability that a given residue is found on the surface of the protein. Regions where the antigenic index score is greater than 0.9 over at least 6 amino acids are indicated in Table 1B as “Predicted Epitopes”. In particular embodiments, polypeptides of the invention comprise, or alternatively consist of, one, two, three, four, five or more of the predicted epitopes described in Table 1B. It will be appreciated that, depending on the analytical criteria used to predict antigenic determinants, the exact address of the determinant may vary slightly.

[1018] Column 8 of Table 1B provides an expression profile and library code:count for each of the contig sequences (SEQ ID NO:X) disclosed in Table 1B, which can routinely be combined with the information provided in Table 4 and used to determine the tissues, cells, and/or cell line libraries which predominantly express the polynucleotides of the invention. The first code number shown in Table 1B column 8 (preceding the colon), represents the tissue/cell source identifier code corresponding to the key provided in Table 4. Expression of these polynucleotides was not observed in the other tissues and/or cell libraries tested. The second number in column 8 (following the colon), represents the number of times a sequence corresponding to the reference polynucleotide sequence (e.g., SEQ ID NO:X) was identified in the corresponding tissue/cell source. Utilizing this technology, cDNAs were amplified by PCR and then transferred, in duplicate, onto the array. Gene expression was assayed through hybridization of first strand cDNA probes to the DNA array. cDNA probes were generated from total RNA extracted from a variety of different tissues and cell lines. Probe synthesis was performed in the presence of ³³P dCTP, using oligo(dT) to prime reverse transcription. After hybridization, high stringency washing conditions were employed to remove non-specific hybrids from the array. The remaining signal, emanating from each gene target, was measured using a Phosphorimager. Gene expression was reported as Phosphor Stimulating Luminescence (PSL) which reflects the level of phosphor signal generated from the probe hybridized to each of the gene targets represented on the array. A local background signal subtraction was performed before the total signal generated from each array was used to normalize gene expression between the different hybridizations. The value presented after “[array code]:” represents the mean of the duplicate values, following background subtraction and probe normalization. One of skill in the art could routinely use this information to identify normal and/or diseased tissue(s), which show a predominant expression pattern of the corresponding polynucleotide of the invention or to identify polynucleotides which show predominant and/or specific tissue and/or cell expression.

[1019] Column 9 of Table 1B (“Cytologic Band”) provides a chromosomal location for certain polynucleotides corresponding to SEQ ID NO:X. Chromosomal location was determined by finding exact matches to EST and cDNA sequences contained in the NCBI (National Center for Biotechnology Information) UniGene database. Each sequence in the UniGene database is assigned to a “cluster”; all of the ESTs, cDNAs, and STSs in a cluster are believed to be derived from a single gene. Chromosomal mapping data is often available for one or more sequence(s) in a UniGene cluster; this data (if consistent) is then applied to the cluster as a whole. Thus, it is possible to infer the chromosomal location of a new polynucleotide sequence by determining its identity with a mapped UniGene cluster. A modified version of the computer program BLASTN (Altshul, et al., J. Mol. Biol. 215:403-410 (1990), and Gish and States, Nat. Genet. 3:266-272) (1993) was used to search the UniGene database for EST or cDNA sequences that contain exact or near-exact matches to a polynucleotide sequence of the invention (the ‘Query’). A sequence from the UniGene database (the ‘Subject’) was said to be an exact match if it contained a segment of 50 nucleotides in length such that 48 of those nucleotides were in the same order as found in the Query sequence. If all of the matches that met this criteria were in the same UniGene cluster, and mapping data was available for this cluster, it is indicated in Table 1B under the heading “Cytologic Band”. Where a cluster had been further localized to a distinct cytologic band, that band is disclosed; where no banding information was available, but the gene had been localized to a single chromosome, the chromosome is disclosed.

[1020] Given a presumptive chromosomal location, disease locus association was determined by comparison with the Morbid Map, derived from Online Mendelian Inheritance in Man (Online Mendelian Inheritance in Man, OMIM™. McKusick-Nathans Institute for Genetic Medicine, Johns Hopkins University (Baltimore, Md.) and National Center for Biotechnology Information, National Library of Medicine (Bethesda, Md.) 2000. World Wide Web URL: http://www.ncbi.nlm.nih.gov/omim/). If the putative chromosomal location of the Query overlaps with the chromosomal location of a Morbid Map entry, an OMIM identification number is disclosed in Table 1B, column 10, labeled “OMIM Disease Reference(s)”. A key to the OMIM reference identification numbers, as well as a description of the associated disease, are provided in Table 5.

TABLE 1B

| | | | | | AA | | | | |
|---|---|---|---|---|---|---|---|---|---|
| | | | SEQ | | SEQ | | Tissue Distribution | | |
| | | | ID | | ID | | Library code: count | | OMIM |
| Gene | cDNA | | NO: | ORF | NO: | | (see Table 4 for Library | Cytologic | Disease |
| No: | Clone ID | Contig ID: | X | (From-To) | Y | Predicted Epitopes | Codes) | Band | Reference(s): |
| 1 | HERHC26 | 1337815 | 11 | 78-1553 | 193 | | L0748: 11, H0722: 10, | 17p13 | 138190, |
| | | | | | | | H0246: 10, L0774: 9, | | 271900, |
| | | | | | | | H0509: 8, S0438: 7, H0742: | | 600977, |
| | | | | | | | 6, H0549: 6, H0510: 6, | | 601202, |
| | | | | | | | L0581: 6, H0748: 4, H0730: | | 603644, |
| | | | | | | | 3, L3388: 3, H0550: 3, | | 605779, |
| | | | | | | | H0197: 3, L0615: 2, H0749: | | 605809, |
| | | | | | | | 2, H0574: 2, H0620: 2, | | 606272, |
| | | | | | | | H0014: 2, H0355: 2, H0424: | | 606272, |
| | | | | | | | 2, L3818: 2, L0809: 2, | | 606272, |
| | | | | | | | L0605: 2, H0661: 1, H0741: | | 606272, |
| | | | | | | | 1, L5031: 1, H0393: 1, | | 606579 |
| | | | | | | | H0643: 1, H0744: 1, H0150: | | |
| | | | | | | | 1, H0012: 1, H0047: 1, | | |
| | | | | | | | H0199: 1, H0057: 1, H0015: | | |
| | | | | | | | 1, H0239: 1, H0039: 1, | | |
| | | | | | | | H0063: 1, H0745: 1, S0440: | | |
| | | | | | | | 1, H0743: 1, L0803: 1, | | |
| | | | | | | | L0806: 1, L0518: 1, L0783: | | |
| | | | | | | | 1, L0790: 1, H0144: 1, | | |
| | | | | | | | H0521: 1, H0784: 1, L0749: | | |
| | | | | | | | 1 and L0589: 1. | | |
| 2 | HERHC24 | 1337814 | 12 | 23-523 | 194 | Gly-38 to Gln-43, | L0748: 11, H0722: 10, | 17p13 | 138190, |
| | | | | | | Gly-53 to Gly-59, | H0246: 10, L0774: 9, | | 271900, |
| | | | | | | Cys-70 to His-80. | H0509: 8, S0438: 7, H0742: | | 600977, |
| | | | | | | | 6, H0549: 6, H0510: 6, | | 601202, |
| | | | | | | | H0521: 6, L0581: 6, H0748: | | 603644, |
| | | | | | | | 4, H0730: 3, L3388: 3, | | 605779, |
| | | | | | | | H0550: 3, H0197: 3, L0615: | | 605809, |
| | | | | | | | 2, H0749: 2, H0574: 2, | | 606272, |
| | | | | | | | H0620: 2, H0014: 2, H0355: | | 606272, |
| | | | | | | | 2, H0424: 2, L3818: 2, | | 606272, |
| | | | | | | | L0809: 2, H0522: 2, L0605: | | 606272, |
| | | | | | | | 2, H0661: 1, H0741: 1, | | 606579 |
| | | | | | | | L5031: 1, H0393: 1, H0643: | | |
| | | | | | | | 1, H0744: 1, H0150: 1, | | |
| | | | | | | | H0012: 1, H0047: 1, H0199: | | |
| | | | | | | | 1, H0057: 1, H0015: 1, | | |
| | | | | | | | H0239: 1, H0039: 1, H0063: | | |
| | | | | | | | 1, H0264: 1, H0488: 1, | | |
| | | | | | | | H0745: 1, S0440: 1, H0743: | | |
| | | | | | | | 1, L0766: 1, L0803: 1, | | |
| | | | | | | | L0806: 1, L0518: 1, L0783: | | |
| | | | | | | | 1, L0790: 1, H0144: 1, | | |
| | | | | | | | H0784: 1, S0037: 1, L0749: | | |
| | | | | | | | 1, L0596: 1 and L0589: 1. | | |
| 3 | HEELM24 | 1338306 | 13 | 56-541 | 195 | Glu-13 to Trp-18, | S0242: 45, S0196: 31, | 2q23.3 | 182390, |
| | | | | | | Glu-41 to Lys-48, | H0250: 23, S0003: 8, S0298: | | 182390, |
| | | | | | | Pro-99 to GLy-106, | 4, L0747: 4, H0545: 3, | | 603513, |
| | | | | | | Asn-118 to Tyr-128, | S0214: 3, S0052: 3, S0040: | | 603964, |
| | | | | | | Asp-141 to Phe-146, | 2, S0360: 2, H0271: 2, | | 604403, |
| | | | | | | Pro-149 to Ile-160. | H0641: 2, L0800: 2, L0794: | | 605818 |
| | | | | | | | 2, L0804: 2, H0144: 2, | | |
| | | | | | | | H0518: 2, S0027: 2, L0743: | | |
| | | | | | | | 2, L0758: 2, L0759: 2, | | |
| | | | | | | | S0192: 2, H0624: 1, H0717: | | |
| | | | | | | | 1, S0212: 1, H0638: 1, | | |
| | | | | | | | S0356: 1, S0132: 1, H0770: | | |
| | | | | | | | 1, L3387: 1, H0486: 1, | | |
| | | | | | | | H0635: 1, H0309: 1, H0061: | | |
| | | | | | | | 1, H0416: 1, H0313: 1, | | |
| | | | | | | | H0551: 1, H0647: 1, L0598: | | |
| | | | | | | | 1, L0762: 1, L7069: 1, | | |
| | | | | | | | L0521: 1, L0659: 1, L0544: | | |
| | | | | | | | 1, S0216: 1, L3639: 1, | | |
| | | | | | | | H0691: 1, H0525: 1, H0528: | | |
| | | | | | | | 1, H0522: 1, H0789: 1, | | |
| | | | | | | | S3014: 1, L0779: 1, L0777: | | |
| | | | | | | | 1, L0780: 1, H0444: 1, | | |
| | | | | | | | H0665: 1 and S0194: 1. | | |
| 4 | HEFEZ39 | 1336526 | 14 | 132-530 | 196 | Gly-29 to Gly-34, | L2570: 23, L3388: 12, | 13q32.3 | 601837, |
| | | | | | | Asp-48 to Asp-54, | S0440: 12, L0666: 8, S0422: | | 606258 |
| | | | | | | Ser-87 to Asn-95, | 7, L0665: 7, L2513: 6, | | |
| | | | | | | Arg-104 to Tyr-110, | L0662: 6, H0521: 6, L0439: | | |
| | | | | | | Thr-127 to Ala-133. | 6, L0754: 6, L0756: 6, | | |
| | | | | | | | H0551: 5, L3832: 5, H0657: | | |
| | | | | | | | 4, S0358: 4, S0360: 4, | | |
| | | | | | | | H0013: 4, L0766: 4, L2884: | | |
| | | | | | | | 3, H0580: 3, H0771: 3, | | |
| | | | | | | | L3817: 3, H0791: 3, H0581: | | |
| | | | | | | | 3, H0150: 3, H0674: 3, | | |
| | | | | | | | L0805: 3, L0776: 3, L0664: | | |
| | | | | | | | 3, H0539: 3, S0406: 3, | | |
| | | | | | | | H0782: 2, H0583: 2, L2995: | | |
| | | | | | | | 2, L2282: 2, S0418: 2, | | |
| | | | | | | | S0420: 2, S0442: 2, S0408: | | |
| | | | | | | | 2, S0007: 2, H0747: 2, | | |
| | | | | | | | L2788: 2, L2789: 2, H0351: | | |
| | | | | | | | 2, H0441: 2, L3816: 2, | | |
| | | | | | | | H0486: 2, H0156: 2, H0098: | | |
| | | | | | | | 2, H0590: 2, H0004: 2, | | |
| | | | | | | | L0471: 2, H0328: 2, H0030: | | |
| | | | | | | | 2, H0494: 2, L3181: 2, | | |
| | | | | | | | L5152: 2, L0646: 2, L0771: | | |
| | | | | | | | 2, L0649: 2, L0774: 2, | | |
| | | | | | | | L0657: 2, L6427: 2, L5623: | | |
| | | | | | | | 2, L2260: 2, L0565: 2, | | |
| | | | | | | | L3827: 2, H0547: 2, H0648: | | |
| | | | | | | | 2, S0330: 2, S0380: 2, | | |
| | | | | | | | S0152: 2, H0522: 2, H0555: | | |
| | | | | | | | 2, H0478: 2, L0750: 2, | | |
| | | | | | | | L0777: 2, H0445: 2, S0436: | | |
| | | | | | | | 2, L0362: 2, S0192: 2, | | |
| | | | | | | | H0543: 2, L3839: 2, H0624: | | |
| | | | | | | | 1, H0170: 1, H0556: 1, | | |
| | | | | | | | L3643: 1, S0342: 1, H0294: | | |
| | | | | | | | 1, H0656: 1, S0116: 1, | | |
| | | | | | | | H0341: 1, S0212: 1, H0662: | | |
| | | | | | | | 1, H0761: 1, H0450: 1, | | |
| | | | | | | | H0638: 1, S0356: 1, S0444: | | |
| | | | | | | | 1, L3705: 1, H0742: 1, | | |
| | | | | | | | H0722: 1, H0735: 1, H0794: | | |
| | | | | | | | 1, H0749: 1, H0770: 1, | | |
| | | | | | | | H0778: 1, H0777: 1, H0772: | | |
| | | | | | | | 1, H0645: 1, H0619: 1, | | |
| | | | | | | | L2819: 1, L3485: 1, L5438: | | |
| | | | | | | | 1, H0406: 1, H0549: 1, | | |
| | | | | | | | H0431: 1, H0370: 1, H0415: | | |
| | | | | | | | 1, H0600: 1, H0586: 1, | | |
| | | | | | | | H0331: 1, H0574: 1, L1789: | | |
| | | | | | | | 1, T0060: 1, H0069: 1, | | |
| | | | | | | | H0427: 1, H0599: 1, H0147: | | |
| | | | | | | | 1, S0010: 1, H0421: 1, | | |
| | | | | | | | H0052: 1, H0263: 1, H0596: | | |
| | | | | | | | 1, L0040: 1, H0597: 1, | | |
| | | | | | | | H0569: 1, H0123: 1, H0012: | | |
| | | | | | | | 1, H0023: 1, H0510: 1, | | |
| | | | | | | | H0375: 1, S0003: 1, S0022: | | |
| | | | | | | | 1, S0214: 1, H0615: 1, | | |
| | | | | | | | H0039: 1, H0622: 1, T0006: | | |
| | | | | | | | 1, H0617: 1, H0673: 1, | | |
| | | | | | | | H0090: 1, H0487: 1, H0413: | | |
| | | | | | | | 1, H0059: 1, T0042: 1, | | |
| | | | | | | | H0334: 1, S0464: 1, H0745: | | |
| | | | | | | | 1, H0509: 1, H0641: 1, | | |
| | | | | | | | H0767: 1, H0647: 1, H0649: | | |
| | | | | | | | 1, S0002: 1, L3162: 1, | | |
| | | | | | | | H0743: 1, L0769: 1, L0638: | | |
| | | | | | | | 1, L0637: 1, L6415: 1, | | |
| | | | | | | | L0364: 1, L0650: 1, L0651: | | |
| | | | | | | | 1, L0806: 1, L0654: 1, | | |
| | | | | | | | L0655: 1, L0527: 1, L0659: | | |
| | | | | | | | 1, L0384: 1, L0809: 1, | | |
| | | | | | | | L0789: 1, L0663: 1, L3391: | | |
| | | | | | | | 1, L3634: 1, L2653: 1, | | |
| | | | | | | | L3635: 1, L2264: 1, L3819: | | |
| | | | | | | | 1, L3639: 1, L5244: 1, | | |
| | | | | | | | H0144: 1, H0780: 1, H0779: | | |
| | | | | | | | 1, L3811: 1, L3828: 1, | | |
| | | | | | | | L3829: 1, H0520: 1, H0519: | | |
| | | | | | | | 1, H0690: 1, H0659: 1, | | |
| | | | | | | | H0660: 1, S0378: 1, H0754: | | |
| | | | | | | | 1, H0753: 1, S0454: 1, | | |
| | | | | | | | H0696: 1, H0134: 1, S0404: | | |
| | | | | | | | 1, H0784: 1, H0785: 1, | | |
| | | | | | | | S0028: 1, L0748: 1, L0747: | | |
| | | | | | | | 1, L0749: 1, L0731: 1, | | |
| | | | | | | | L0758: 1, S0031: 1, L2200: | | |
| | | | | | | | 1, H0595: 1, H0707: 1, | | |
| | | | | | | | S0434: 1, L0596: 1, H0668: | | |
| | | | | | | | 1, H0667: 1, S0242: 1, | | |
| | | | | | | | H0423: 1, H0801: 1, S0424: | | |
| | | | | | | | 1, L3352: 1, L2853: 1, | | |
| | | | | | | | L3804: 1 and H0712: 1. | | |
| 5 | HEFFH42 | 1335777 | 15 | 153-965 | 197 | | H0717: 7, L0163: 7, | | |
| | | | | | | | L0731: 7, H0549: 6, L0809: | | |
| | | | | | | | 6, H0550: 5, H0713: 3, | | |
| | | | | | | | H0619: 3, H0050: 3, T0041: | | |
| | | | | | | | 3, L0743: 3, H0662: 2, | | |
| | | | | | | | H0645: 2, H0592: 2, H0587: | | |
| | | | | | | | 2, H0617: 2, L5622: 2, | | |
| | | | | | | | L0756: 2, L0758: 2, H0782: | | |
| | | | | | | | 1, S0110: 1, S0358: 1, | | |
| | | | | | | | H0772: 1, H0586: 1, H0427: | | |
| | | | | | | | 1, T0082: 1, H0194: 1, | | |
| | | | | | | | H0041: 1, H0081: 1, H0266: | | |
| | | | | | | | 1, H0188: 1, H0124: 1, | | |
| | | | | | | | H0087: 1, L5575: 1, L6417: | | |
| | | | | | | | 1, L0794: 1, L0659: 1, | | |
| | | | | | | | L0783: 1, L3872: 1, H0783: | | |
| | | | | | | | 1, S0378: 1, L0779: 1, | | |
| | | | | | | | L0755: 1 and S0260: 1. | | |
| 6 | HLCOO14 | 1335382 | 16 | 297-1055 | 198 | Asn-30 to Ser-45, | H0494: 8, H0553: 3, | 4q13-q21 | 103600, |
| | | | | | | Pro-70 to Ile-93, | S0476: 2, S0406: 2, H0721: | | 103600, |
| | | | | | | Lys-109 to Phe-150, | 1, H0710: 1, H0483: 1, | | 103600, |
| | | | | | | Cys-172 to Gly-178, | L0005: 1, S0356: 1, S0132: | | 104150, |
| | | | | | | Lys-230 to Gly-246. | 1, H0586: 1, H0635: 1, | | 104150, |
| | | | | | | | H0031: 1, S0440: 1, H0767: | | 104500, |
| | | | | | | | 1, L0373: 1, L3634: 1 and | | 147060, |
| | | | | | | | S0436: 1. | | 163890, |
| | | | | | | | | | 170650, |
| | | | | | | | | | 173910, |
| | | | | | | | | | 179502, |
| | | | | | | | | | 252500, |
| | | | | | | | | | 252500, |
| | | | | | | | | | 603345, |
| | | | | | | | | | 606585 |
| 7 | HLEFV28 | 1335435 | 17 | 99-497 | 199 | Pro-42 to Gly-58, | H0768: 1 | | |
| | | | | | | Met-60 to Glu-65, | | | |
| | | | | | | Pro-67 to Gly-74, | | | |
| | | | | | | Pro-82 to Pro-97. | | | |
| 8 | HLEGA38 | 1335424 | 18 | 74-520 | 200 | Pro-42 to Gly-49. | H0575: 10, H0375: 1 and | | |
| | | | | | | | H0768: 1. | | |
| | HLEGA38 | 1337616 | 168 | 109-417 | 350 | | | | |
| 9 | HPCBJ78 | 1337797 | 19 | 24-833 | 201 | Glu-33 to Trp-40, | H0766: 1 | | |
| | | | | | | Tyr-48 to Cys-58, | | | |
| | | | | | | Ser-76 to Tyr-81, | | | |
| | | | | | | Lys-109 to Asn-120, | | | |
| | | | | | | Cys-212 to Gly-218, | | | |
| | | | | | | Ala-224 to Trp-229, | | | |
| | | | | | | Gly-242 to His-247. | | | |
| 10 | HEDBJ87 | 1336693 | 20 | 62-493 | 202 | Trp-19 to Ser-31, | H0713: 6, H0717: 5, | 4p16.3-q21 | 102680, |
| | | | | | | Gln-51 to Gly-57, | H0754: 5, H0716: 4, H0772: | | 134934, |
| | | | | | | Pro-103 to Arg-111. | 4, L0758: 4, S0436: 4, | | 134934, |
| | | | | | | | S0408: 3, H0771: 3, H0100: | | 134934, |
| | | | | | | | 3, L6432: 3, L0649: 3, | | 134934, |
| | | | | | | | S0356: 2, S0358: 2, H0645: | | 134934, |
| | | | | | | | 2, S0336: 2, H0163: 2, | | 134934, |
| | | | | | | | S0440: 2, L7065: 2, L0662: | | 134934, |
| | | | | | | | 2, L0774: 2, L0776: 2, | | 134934, |
| | | | | | | | L0663: 2, H0757: 2, H0724: | | 143100, |
| | | | | | | | 2, S0406: 2, L0779: 2, | | 180072, |
| | | | | | | | L0759: 2, L0599: 2, H0782: | | 180072, |
| | | | | | | | 1, S0444: 1, H0733: 1, | | 194190, |
| | | | | | | | H0770: 1, H0777: 1, H0549: | | 252800, |
| | | | | | | | 1, H0587: 1, H0575: 1, | | 252800, |
| | | | | | | | H0590: 1, H0309: 1, L4788: | | 252800, |
| | | | | | | | 1, S0314: 1, T0006: 1, | | 602104, |
| | | | | | | | H0553: 1, H0383: 1, H0551: | | 605841 |
| | | | | | | | 1, L4498: 1, L0763: 1, | | |
| | | | | | | | L0770: 1, L5565: 1, L0642: | | |
| | | | | | | | 1, L6412: 1, L6418: 1, | | |
| | | | | | | | L0651: 1, L0653: 1, L0657: | | |
| | | | | | | | 1, L0659: 1, L0809: 1, | | |
| | | | | | | | L5622: 1, L0791: 1, H0725: | | |
| | | | | | | | 1, H0683: 1, H0672: 1, | | |
| | | | | | | | S0380: 1, H0555: 1 and | | |
| | | | | | | | L0757: 1. | | |
| 11 | HEELE81 | 1335729 | 21 | 47-1861 | 203 | Met-1 to Pro-10, | H0521: 24, H0551: 9, | 1q24 | 107300, |
| | | | | | | Ser-156 to Trp-161, | L0748: 7, S0436: 7, H0253: | | 131210, |
| | | | | | | Leu-358 to Ile-366, | 5, S0278: 3, S0210: 3, | | 136132, |
| | | | | | | Leu-375 to Glu-380, | L3832: 3, S0212: 2, S0418: | | 164690, |
| | | | | | | Gln-421 to Lys-431, | 2, S0442: 2, S0354: 2, | | 173610, |
| | | | | | | Pro-492 to Gln-502, | S0358: 2, S0360: 2, H0618: | | 604283, |
| | | | | | | Cys-512 to Leu-517, | 2, H0545: 2, H0024: 2, | | 604614, |
| | | | | | | Glu-572 to Thr-577, | H0271: 2, H0416: 2, S0250: | | 605205, |
| | | | | | | Asp-579 to Met-585, | 2, H0553: 2, L5244: 2, | | 605429, |
| | | | | | | Lys-587 to Pro-594. | L3827: 2, L3828: 2, H0593: | | 605549 |
| | | | | | | | 2, S0126: 2, H0435: 2, | | |
| | | | | | | | H0522: 2, L0439: 2, H0782: | | |
| | | | | | | | 1, H0265: 1, H0638: 1, | | |
| | | | | | | | S0376: 1, H0580: 1, H0728: | | |
| | | | | | | | 1, H0734: 1, H0778: 1, | | |
| | | | | | | | L5049: 1, L5042: 1, L5403: | | |
| | | | | | | | 1, L5448: 1, H0550: 1, | | |
| | | | | | | | H0610: 1, H0257: 1, H0559: | | |
| | | | | | | | 1, T0040: 1, L3501: 1, | | |
| | | | | | | | H0575: 1, H0196: 1, H0546: | | |
| | | | | | | | 1, H0150: 1, H0620: 1, | | |
| | | | | | | | H0373: 1, H0286: 1, H0428: | | |
| | | | | | | | 1, H0622: 1, H0628: 1, | | |
| | | | | | | | H0181: 1, H0606: 1, H0598: | | |
| | | | | | | | 1, H0040: 1, H0494: 1, | | |
| | | | | | | | H0652: 1, H0773: 1, L3818: | | |
| | | | | | | | 1, S0422: 1, S0426: 1, | | |
| | | | | | | | L3905: 1, L2257: 1, H0779: | | |
| | | | | | | | 1, L3829: 1, H0651: 1, | | |
| | | | | | | | S0330: 1, H0785: 1, S0037: | | |
| | | | | | | | 1, S0027: 1, S0028: 1, | | |
| | | | | | | | L0741: 1, L0744: 1, L0740: | | |
| | | | | | | | 1, L0754: 1, L0757: 1, | | |
| | | | | | | | L0758: 1, L0759: 1, L2158: | | |
| | | | | | | | 1, S0434: 1, L0601: 1, | | |
| | | | | | | | S0194: 1, S0196: 1, L0718: | | |
| | | | | | | | 1 and H0506: 1. | | |
| 12 | HEFEW51 | 1335745 | 22 | 86-655 | 204 | Lys-27 to Glu-35, | L0744: 35, H0733: 15, | 3q26.2-qter | |
| | | | | | | Arg-151 to Thr-159. | T0006: 15, S0031: 15, | | |
| | | | | | | | H0772: 12, S0222: 12, | | |
| | | | | | | | L0742: 12, H0427: 8, | | |
| | | | | | | | S0282: 7, L5401: 7, S0366: | | |
| | | | | | | | 7, H0713: 6, H0771: 6, | | |
| | | | | | | | S0010: 6, S0051: 6, L0743: | | |
| | | | | | | | 6, L0754: 6, S0260: 6, | | |
| | | | | | | | H0739: 5, H0716: 5, H0728: | | |
| | | | | | | | 5, H0051: 5, S0036: 5, | | |
| | | | | | | | L0604: 5, H0782: 4, T0060: | | |
| | | | | | | | 4, S0334: 4, S0364: 4, | | |
| | | | | | | | H0063: 4, L0655: 4, S0330: | | |
| | | | | | | | 4, L0747: 4, L4884: 3, | | |
| | | | | | | | H0662: 3, H0729: 3, H0586: | | |
| | | | | | | | 3, H0052: 3, H0327: 3, | | |
| | | | | | | | L4788: 3, H0188: 3, S0318: | | |
| | | | | | | | 3, S0336: 3, S0316: 3, | | |
| | | | | | | | S0312: 3, H0031: 3, H0644: | | |
| | | | | | | | 3, H0090: 3, S0038: 3, | | |
| | | | | | | | L0662: 3, H0766: 3, L0749: | | |
| | | | | | | | 3, L0758: 3, L0589: 3, | | |
| | | | | | | | H0669: 2, S0358: 2, S0360: | | |
| | | | | | | | 2, H0734: 2, H0770: 2, | | |
| | | | | | | | S6016: 2, H0441: 2, H0370: | | |
| | | | | | | | 2, L0623: 2, H0599: 2, | | |
| | | | | | | | H0618: 2, S0346: 2, S0049: | | |
| | | | | | | | 2, H0373: 2, S0340: 2, | | |
| | | | | | | | S0314: 2, H0328: 2, H0708: | | |
| | | | | | | | 2, S0464: 2, L0665: 2, | | |
| | | | | | | | H0780: 2, L5273: 2, H0658: | | |
| | | | | | | | 2, H0672: 2, S0044: 2, | | |
| | | | | | | | L0439: 2, L0753: 2, L0731: | | |
| | | | | | | | 2, S0434: 2, L0600: 2, | | |
| | | | | | | | S6024: 1, S0116: 1, S0110: | | |
| | | | | | | | 1, S0030: 1, H0664: 1, | | |
| | | | | | | | L4868: 1, S0442: 1, S0444: | | |
| | | | | | | | 1, L3645: 1, H0735: 1, | | |
| | | | | | | | S0300: 1, H0462: 1, H0431: | | |
| | | | | | | | 1, L3503: 1, L3655: 1, | | |
| | | | | | | | S0280: 1, L0021: 1, T0082: | | |
| | | | | | | | 1, H0421: 1, H0363: 1, | | |
| | | | | | | | H0310: 1, H0194: 1, H0044: | | |
| | | | | | | | 1, H0081: 1, S0388: 1, | | |
| | | | | | | | H0399: 1, H0594: 1, S6028: | | |
| | | | | | | | 1, H0110: 1, H0622: 1, | | |
| | | | | | | | H0553: 1, L0142: 1, H0087: | | |
| | | | | | | | 1, T0069: 1, T0004: 1, | | |
| | | | | | | | S0112: 1, L0435: 1, L0769: | | |
| | | | | | | | 1, L3904: 1, L3905: 1, | | |
| | | | | | | | L0772: 1, L0773: 1, L0784: | | |
| | | | | | | | 1, L0659: 1, L0526: 1, | | |
| | | | | | | | L0783: 1, L0530: 1, L4779: | | |
| | | | | | | | 1, L3639: 1, L3641: 1, | | |
| | | | | | | | H0144: 1, L4347: 1, L4350: | | |
| | | | | | | | 1, H0725: 1, H0723: 1, | | |
| | | | | | | | H0757: 1, H0724: 1, H0783: | | |
| | | | | | | | 1, L3811: 1, H0752: 1, | | |
| | | | | | | | H0521: 1, S3012: 1, S0390: | | |
| | | | | | | | 1, S0027: 1, L0741: 1, | | |
| | | | | | | | L0748: 1, L0777: 1, L0755: | | |
| | | | | | | | 1, L0759: 1, S0436: 1, | | |
| | | | | | | | L0485: 1, S0106: 1, S0192: | | |
| | | | | | | | 1 and L2847: 1. | | |
| 13 | HLEFO22 | 1337615 | 23 | 140-547 | 205 | Pro-42 to Gly-58, | H0768: 1 | | |
| | | | | | | Pro-67 to Gly-74, | | | |
| | | | | | | Cys-85 to Pro-97. | | | |
| 14 | HEELG41 | 1335998 | 24 | 44-535 | 206 | Gly-37 to Asp-48, | S0358: 8, H0457: 6, | 6p24 | 125647, |
| | | | | | | Tyr-99 to Pro-108, | L0777: 6, S0436: 6, L0748: | | 125647, |
| | | | | | | Pro-117 to Asp-123, | 5, H0156: 4, L0776: 4, | | 125647, |
| | | | | | | Pro-143 to Pro-149. | L0439: 4, H0341: 3, S0418: | | 125647, |
| | | | | | | | 3, S0142: 3, L0758: 3, | | 134570, |
| | | | | | | | H0685: 2, S0420: 2, S0046: | | 600429, |
| | | | | | | | 2, H0370: 2, H0545: 2, | | 601900 |
| | | | | | | | H0012: 2, H0617: 2, H0264: | | |
| | | | | | | | 2, H0494: 2, L0769: 2, | | |
| | | | | | | | L6418: 2, L0766: 2, L0775: | | |
| | | | | | | | 2, L0807: 2, L3820: 2, | | |
| | | | | | | | H0660: 2, H0539: 2, L0747: | | |
| | | | | | | | 2, L0731: 2, L0596: 2, | | |
| | | | | | | | H0422: 2, H0506: 2, H0265: | | |
| | | | | | | | 1, H0556: 1, H0140: 1, | | |
| | | | | | | | H0661: 1, H0662: 1, H0761: | | |
| | | | | | | | 1, H0638: 1, L1562: 1, | | |
| | | | | | | | S0356: 1, S0444: 1, S0410: | | |
| | | | | | | | 1, L2319: 1, H0729: 1, | | |
| | | | | | | | H0722: 1, H0728: 1, H0776: | | |
| | | | | | | | 1, H0393: 1, L5404: 1, | | |
| | | | | | | | S0278: 1, H0549: 1, L4845: | | |
| | | | | | | | 1, H0231: 1, L0738: 1, | | |
| | | | | | | | H0081: 1, L0471: 1, H0620: | | |
| | | | | | | | 1, S0051: 1, H0083: 1, | | |
| | | | | | | | H0594: 1, H0031: 1, H0181: | | |
| | | | | | | | 1, H0673: 1, H0135: 1, | | |
| | | | | | | | H0038: 1, H0551: 1, S0440: | | |
| | | | | | | | 1, S0150: 1, H0773: 1, | | |
| | | | | | | | S0422: 1, L0763: 1, L3905: | | |
| | | | | | | | 1, L0372: 1, L0800: 1, | | |
| | | | | | | | L0553: 1, L0773: 1, L0768: | | |
| | | | | | | | 1, L0774: 1, L0805: 1, | | |
| | | | | | | | L0655: 1, L0518: 1, L0783: | | |
| | | | | | | | 1, L0809: 1, L0519: 1, | | |
| | | | | | | | L6411: 1, L3635: 1, L2258: | | |
| | | | | | | | 1, L2260: 1, L0710: 1, | | |
| | | | | | | | L5244: 1, S0374: 1, H0764: | | |
| | | | | | | | 1, H0593: 1, H0690: 1, | | |
| | | | | | | | H0666: 1, H0766: 1, S0392: | | |
| | | | | | | | 1, L0750: 1, L0759: 1, | | |
| | | | | | | | S0434: 1 and H0543: 1. | | |
| 15 | HNEMP21 | 1344654 | 25 | 119-856 | 207 | Arg-25 to Gly-31, | H0521: 100, H0522: 32, | | |
| | | | | | | Pro-45 to Gly-52, | H0445: 16, L0748: 13, | | |
| | | | | | | Pro-71 to Gly-76, | S0360: 9, H0553: 7, H0575: | | |
| | | | | | | Pro-81 to Gly-91, | 6, L0754: 6, S0434: 6, | | |
| | | | | | | Glu-107 to Phe-118, | S0354: 4, L5067: 4, H0427: | | |
| | | | | | | Thr-125 to Pro-134, | 3, H0039: 3, H0622: 3, | | |
| | | | | | | Pro-147 to Gly-156, | H0644: 3, H0090: 3, H0264: | | |
| | | | | | | Gly-194 to Asn-203. | 3, S0374: 3, L0744: 3, | | |
| | | | | | | | L0747: 3, S0436: 3, H0638: | | |
| | | | | | | | 2, S0358: 2, S0376: 2, | | |
| | | | | | | | S0408: 2, H0309: 2, H0009: | | |
| | | | | | | | 2, H0620: 2, H0376: 2, | | |
| | | | | | | | H0063: 2, S0438: 2, L0659: | | |
| | | | | | | | 2, H0658: 2, H0672: 2, | | |
| | | | | | | | H0555: 2, L0743: 2, L0755: | | |
| | | | | | | | 2, L0581: 2, H0710: 1, | | |
| | | | | | | | H0713: 1, H0583: 1, L0418: | | |
| | | | | | | | 1, L0785: 1, S0212: 1, | | |
| | | | | | | | S0282: 1, H0661: 1, H0663: | | |
| | | | | | | | 1, L0005: 1, S0442: 1, | | |
| | | | | | | | H0777: 1, H0619: 1, L3388: | | |
| | | | | | | | 1, L4142: 1, L3496: 1, | | |
| | | | | | | | S0280: 1, H0108: 1, H0122: | | |
| | | | | | | | 1, H0581: 1, H0597: 1, | | |
| | | | | | | | H0570: 1, H0123: 1, H0023: | | |
| | | | | | | | 1, H0014: 1, S0362: 1, | | |
| | | | | | | | H0510: 1, H0375: 1, H0252: | | |
| | | | | | | | 1, H0213: 1, H0031: 1, | | |
| | | | | | | | H0189: 1, H0163: 1, L0435: | | |
| | | | | | | | 1, L4824: 1, S0440: 1, | | |
| | | | | | | | H0773: 1, L0769: 1, L3904: | | |
| | | | | | | | 1, L0646: 1, L0378: 1, | | |
| | | | | | | | L0805: 1, L0559: 1, H0726: | | |
| | | | | | | | 1, L0352: 1, H0666: 1, | | |
| | | | | | | | S0330: 1, S0378: 1, H0754: | | |
| | | | | | | | 1, S0190: 1, H0774: 1, | | |
| | | | | | | | H0345: 1, L0439: 1, L0751: | | |
| | | | | | | | 1, H0444: 1, H0343: 1, | | |
| | | | | | | | S0106: 1, H0668: 1, S0384: | | |
| | | | | | | | 1, H0506: 1 and H0352: 1. | | |
| 16 | HNEMU30 | 1344636 | 26 | 118-480 | 208 | Ser-66 to Thr-75, | H0622: 3, L0659: 3, | | |
| | | | | | | Pro-101 to Arg-106. | H0670: 3, S0408: 2, H0606: | | |
| | | | | | | | 2, L4815: 2, L0646: 2, | | |
| | | | | | | | L0771: 2, L0774: 2, L0666: | | |
| | | | | | | | 2, H0295: 1, H0484: 1, | | |
| | | | | | | | S0358: 1, S0410: 1, H0771: | | |
| | | | | | | | 1, L3281: 1, H0549: 1, | | |
| | | | | | | | H0250: 1, H0090: 1, L4817: | | |
| | | | | | | | 1, L0639: 1, L0372: 1, | | |
| | | | | | | | L0643: 1, L0374: 1, L6414: | | |
| | | | | | | | 1, L0648: 1, L0662: 1, | | |
| | | | | | | | L0649: 1, L0560: 1, L0806: | | |
| | | | | | | | 1, L0527: 1, L0657: 1, | | |
| | | | | | | | L6427: 1, L0783: 1, L0383: | | |
| | | | | | | | 1, L0790: 1, L2257: 1, | | |
| | | | | | | | S0378: 1, L0602: 1, H0774: | | |
| | | | | | | | 1, S0406: 1, L0748: 1, | | |
| | | | | | | | L0777: 1, L0780: 1, L0755: | | |
| | | | | | | | 1, S0436: 1, L0601: 1 and | | |
| | | | | | | | L5238: 1. | | |
| 17 | HNEMO56 | 1344633 | 27 | 233-688 | 209 | Trp-35 to Trp-45, | S0410: 14, S0358: 4, | | |
| | | | | | | Pro-52 to Asp-57, | S0444: 3, H0792: 3, S0440: | | |
| | | | | | | Thr-73 to Arg-82, | 3, S0406: 3, H0661: 2, | | |
| | | | | | | Pro-105 to Leu-112, | H0574: 2, H0510: 2, H0509: | | |
| | | | | | | Pro-115 to Arg-127, | 2, S0442: 1, S0360: 1, | | |
| | | | | | | Pro-140 to Gln-151. | S0408: 1, H0742: 1, H0776: | | |
| | | | | | | | 1, H0331: 1, H0615: 1, | | |
| | | | | | | | H0059: 1, S0438: 1, L0772: | | |
| | | | | | | | 1, L0764: 1, L0648: 1, | | |
| | | | | | | | L0774: 1, L0791: 1, H0774: | | |
| | | | | | | | 1 and L0748: 1. | | |
| 18 | HEELQ12 | 1335802 | 28 | 79-639 | 210 | Phe-59 to Gln-64, | H0422: 2, H0341: 1, | | |
| | | | | | | Asp-116 to Ser-121. | H0083: 1, H0280: 1, H0773: | | |
| | | | | | | | 1 and L0740: 1. | | |
| 19 | HLCOY89 | 1335885 | 29 | 103-807 | 211 | Pro-27 to Leu-33, | L0794: 5, H0616: 4, | | |
| | | | | | | Pro-48 to Lys-62, | L0744: 3, L0779: 3, L0758: | | |
| | | | | | | Ser-69 to Phe-74, | 3, H0038: 2, L3634: 2, | | |
| | | | | | | Asp-82 to Val-89, | H0551: 1, H0767: 1, L0803: | | |
| | | | | | | Ile-94 to Thr-100, | 1, L6424: 1, L6426: 1, | | |
| | | | | | | Glu-109 to Pro-120. | H0783: 1, L0780: 1 and | | |
| | | | | | | | L0752: 1. | | |
| 20 | HLCPI67 | 1335342 | 30 | 172-522 | 212 | Gly-48 to Glu-62, | L3313: 33, L2319: 16, | | |
| | | | | | | Thr-72 to Ala-81. | L0777: 7, L2880: 5, L0779: | | |
| | | | | | | | 5, L3634: 4, L0749: 4, | | |
| | | | | | | | S0360: 3, L0763: 3, L0768: | | |
| | | | | | | | 3, L0766: 3, L0775: 3, | | |
| | | | | | | | H0144: 3, H0341: 2, L0770: | | |
| | | | | | | | 2, L0774: 2, L0776: 2, | | |
| | | | | | | | L6426: 2, L3639: 2, H0659: | | |
| | | | | | | | 2, L0748: 2, L0740: 2, | | |
| | | | | | | | L0754: 2, L0485: 2, S0114: | | |
| | | | | | | | 1, H0795: 1, H0638: 1, | | |
| | | | | | | | S0358: 1, S0444: 1, L2819: | | |
| | | | | | | | 1, S0222: 1, H0791: 1, | | |
| | | | | | | | H0705: 1, H0581: 1, H0596: | | |
| | | | | | | | 1, L0041: 1, T0003: 1, | | |
| | | | | | | | H0510: 1, S0340: 1, H0412: | | |
| | | | | | | | 1, H0100: 1, H0494: 1, | | |
| | | | | | | | S0306: 1, L0065: 1, S0438: | | |
| | | | | | | | 1, H0767: 1, S0142: 1, | | |
| | | | | | | | S0422: 1, L0769: 1, L0648: | | |
| | | | | | | | 1, L0806: 1, L0807: 1, | | |
| | | | | | | | L0783: 1, L0792: 1, L4508: | | |
| | | | | | | | 1, L2260: 1, L5461: 1, | | |
| | | | | | | | L5243: 1, L2442: 1, H0672: | | |
| | | | | | | | 1, S0328: 1, H0752: 1, | | |
| | | | | | | | S0390: 1, S0027: 1, L0747: | | |
| | | | | | | | 1, L0750: 1, L0780: 1, | | |
| | | | | | | | L0752: 1, L0757: 1, L0758: | | |
| | | | | | | | 1 and H0668: 1. | | |
| 21 | HCPRA19 | 1343653 | 31 | 203-2032 | 213 | Gly-29 to Gly-34, | L2570: 23, L3388: 12, | 13q32.3 | 601837, |
| | | | | | | Asp-48 to Asp-54, | S0440: 12, L0666: 8, S0422: | | 606258 |
| | | | | | | Ser-87 to Asn-95, | 7, L0665: 7, L2513: 6, | | |
| | | | | | | Arg-104 to Tyr-110, | L0662: 6, H0521: 6, L0439: | | |
| | | | | | | Thr-127 to Lys-138, | 6, L0754: 6, L0756: 6, | | |
| | | | | | | Asp-166 to Cys-174. | H0551: 5, L3832: 5, H0657: | | |
| | | | | | | | 4, S0358: 4, S0360: 4, | | |
| | | | | | | | H0013: 4, L0766: 4, L2884: | | |
| | | | | | | | 3, H0580: 3, H0771: 3, | | |
| | | | | | | | L3817: 3, H0791: 3, H0581: | | |
| | | | | | | | 3, H0150: 3, H0674: 3, | | |
| | | | | | | | L0805: 3, L0776: 3, L0664: | | |
| | | | | | | | 3, H0539: 3, S0406: 3, | | |
| | | | | | | | H0782: 2, H0583: 2, L2995: | | |
| | | | | | | | 2, L2282: 2, S0418: 2, | | |
| | | | | | | | S0420: 2, S0442: 2, S0408: | | |
| | | | | | | | 2, S0007: 2, H0747: 2, | | |
| | | | | | | | L2788: 2, L2789: 2, H0351: | | |
| | | | | | | | 2, H0441: 2, L3816: 2, | | |
| | | | | | | | H0486: 2, H0156: 2, H0098: | | |
| | | | | | | | 2, H0590: 2, H0004: 2, | | |
| | | | | | | | L0471: 2, H0328: 2, H0030: | | |
| | | | | | | | 2, H0494: 2, L3181: 2, | | |
| | | | | | | | L5152: 2, L0646: 2, L0771: | | |
| | | | | | | | 2, L0649: 2, L0774: 2, | | |
| | | | | | | | L0657: 2, L6427: 2, L5623: | | |
| | | | | | | | 2, L2260: 2, L0565: 2, | | |
| | | | | | | | L3827: 2, H0547: 2, H0648: | | |
| | | | | | | | 2, S0330: 2, S0380: 2, | | |
| | | | | | | | S0152: 2, H0522: 2, H0555: | | |
| | | | | | | | 2, H0478: 2, L0750: 2, | | |
| | | | | | | | L0777: 2, H0445: 2, S0436: | | |
| | | | | | | | 2, L0362: 2, S0192: 2, | | |
| | | | | | | | H0543: 2, L3839: 2, H0624: | | |
| | | | | | | | 1, H0170: 1, H0556: 1, | | |
| | | | | | | | L3643: 1, S0342: 1, H0294: | | |
| | | | | | | | 1, H0656: 1, S0116: 1, | | |
| | | | | | | | H0341: 1, S0212: 1, H0662: | | |
| | | | | | | | 1, H0761: 1, H0450: 1, | | |
| | | | | | | | H0638: 1, S0356: 1, S0444: | | |
| | | | | | | | 1, L3705: 1, H0742: 1, | | |
| | | | | | | | H0722: 1, H0735: 1, H0794: | | |
| | | | | | | | 1, H0749: 1, H0770: 1, | | |
| | | | | | | | H0778: 1, H0777: 1, H0772: | | |
| | | | | | | | 1, H0645: 1, H0619: 1, | | |
| | | | | | | | L2819: 1, L3485: 1, L5438: | | |
| | | | | | | | 1, H0406: 1, H0549: 1, | | |
| | | | | | | | H0431: 1, H0370: 1, H0415: | | |
| | | | | | | | 1, H0600: 1, H0586: 1, | | |
| | | | | | | | H0331: 1, H0574: 1, L1789: | | |
| | | | | | | | 1, T0060: 1, H0069: 1, | | |
| | | | | | | | H0427: 1, H0599: 1, H0147: | | |
| | | | | | | | 1, S0010: 1, H0421: 1, | | |
| | | | | | | | H0052: 1, H0263: 1, H0596: | | |
| | | | | | | | 1, L0040: 1, H0597: 1, | | |
| | | | | | | | H0569: 1, H0123: 1, H0012: | | |
| | | | | | | | 1, H0023: 1, H0510: 1, | | |
| | | | | | | | H0375: 1, S0003: 1, S0022: | | |
| | | | | | | | 1, S0214: 1, H0615: 1, | | |
| | | | | | | | H0039: 1, H0622: 1, T0006: | | |
| | | | | | | | 1, H0617: 1, H0673: 1, | | |
| | | | | | | | H0090: 1, H0487: 1, H0413: | | |
| | | | | | | | 1, H0059: 1, T0042: 1, | | |
| | | | | | | | H0334: 1, S0464: 1, H0745: | | |
| | | | | | | | 1, H0509: 1, H0641: 1, | | |
| | | | | | | | H0767: 1, H0647: 1, H0649: | | |
| | | | | | | | 1, S0002: 1, L3162: 1, | | |
| | | | | | | | H0743: 1, L0769: 1, L0638: | | |
| | | | | | | | 1, L0637: 1, L6415: 1, | | |
| | | | | | | | L0364: 1, L0650: 1, L0651: | | |
| | | | | | | | 1, L0806: 1, L0654: 1, | | |
| | | | | | | | L0655: 1, L0527: 1, L0659: | | |
| | | | | | | | 1, L0384: 1, L0809: 1, | | |
| | | | | | | | L0789: 1, L0663: 1, L3391: | | |
| | | | | | | | 1, L3634: 1, L2653: 1, | | |
| | | | | | | | L3635: 1, L2264: 1, L3819: | | |
| | | | | | | | 1, L3639: 1, L5244: 1, | | |
| | | | | | | | H0144: 1, H0780: 1, H0779: | | |
| | | | | | | | 1, L3811: 1, L3828: 1, | | |
| | | | | | | | L3829: 1, H0520: 1, H0519: | | |
| | | | | | | | 1, H0690: 1, H0659: 1, | | |
| | | | | | | | H0660: 1, S0378: 1, H0754: | | |
| | | | | | | | 1, H0753: 1, S0454: 1, | | |
| | | | | | | | H0696: 1, H0134: 1, S0404: | | |
| | | | | | | | 1, H0784: 1, H0785: 1, | | |
| | | | | | | | S0028: 1, L0748: 1, L0747: | | |
| | | | | | | | 1, L0749: 1, L0731: 1, | | |
| | | | | | | | L0758: 1, S0031: 1, L2200: | | |
| | | | | | | | 1, H0595: 1, H0707: 1, | | |
| | | | | | | | S0434: 1, L0596: 1, H0668: | | |
| | | | | | | | 1, H0667: 1, S0242: 1, | | |
| | | | | | | | H0423: 1, H0801: 1, S0424: | | |
| | | | | | | | 1, L3352: 1, L2853: 1, | | |
| | | | | | | | L3804: 1 and H0712: 1. | | |
| 22 | HEFEN82 | 1335771 | 32 | 686-1309 | 214 | Pro-30 to Pro-48, | S0358: 4, H0618: 3, | 15q23 | 118485, |
| | | | | | | Leu-56 to Arg-79, | H0494: 3, H0561: 3, S0440: | | 118485, |
| | | | | | | Pro-109 to Gly-122, | 3, S0418: 2, S0049: 2, | | 151670, |
| | | | | | | Pro-159 to Arg-173. | H0052: 2, H0050: 2, H0012: | | 231680, |
| | | | | | | | 2, H0059: 2, L2262: 2, | | 276700, |
| | | | | | | | L2654: 2, L0438: 2, H0547: | | 600374, |
| | | | | | | | 2, L0439: 2, H0656: 1, | | 604485, |
| | | | | | | | H0795: 1, H0255: 1, H0458: | | 604485, |
| | | | | | | | 1, H0638: 1, S0420: 1, | | 606725, |
| | | | | | | | S0444: 1, H0208: 1, L4940: | | 606869, |
| | | | | | | | 1, H0772: 1, H0393: 1, | | 606869, |
| | | | | | | | H0261: 1, S0220: 1, H0370: | | 606869, |
| | | | | | | | 1, H0333: 1, H0632: 1, | | 607248 |
| | | | | | | | H0581: 1, H0309: 1, H0046: | | |
| | | | | | | | 1, H0150: 1, H0620: 1, | | |
| | | | | | | | L0163: 1, H0083: 1, T0023: | | |
| | | | | | | | 1, H0424: 1, H0213: 1, | | |
| | | | | | | | H0617: 1, H0124: 1, H0135: | | |
| | | | | | | | 1, H0038: 1, S0344: 1, | | |
| | | | | | | | H0773: 1, S0422: 1, L0794: | | |
| | | | | | | | 1, L0766: 1, L0708: 1, | | |
| | | | | | | | L2651: 1, L2257: 1, L5241: | | |
| | | | | | | | 1, H0658: 1, L0741: 1, | | |
| | | | | | | | L0744: 1, L0757: 1, L0759: | | |
| | | | | | | | 1, H0445: 1, H0667: 1 and | | |
| | | | | | | | L4435: 1. | | |
| 23 | HEELL43 | 1337306 | 33 | 135-536 | 215 | Met-1 to Ile-6, | H0682: 10, H0521: 10, | | |
| | | | | | | Lys-43 to Asp-50, | H0617: 8, H0423: 7, S0360: | | |
| | | | | | | Thr-57 to Glu-63. | 6, H0773: 6, H0754: 6, | | |
| | | | | | | | H0740: 5, H0620: 5, H0547: | | |
| | | | | | | | 5, S0406: 5, H0657: 4, | | |
| | | | | | | | H0778: 4, H0687: 4, H0641: | | |
| | | | | | | | 4, S0422: 4, H0666: 4, | | |
| | | | | | | | H0584: 3, H0638: 3, H0618: | | |
| | | | | | | | 3, H0039: 3, L0708: 3, | | |
| | | | | | | | H0435: 3, H0670: 3, S0328: | | |
| | | | | | | | 3, H0522: 3, H0445: 3, | | |
| | | | | | | | S0434: 3, H0585: 2, H0713: | | |
| | | | | | | | 2, H0717: 2, H0716: 2, | | |
| | | | | | | | T0049: 2, H0650: 2, H0341: | | |
| | | | | | | | 2, L0946: 2, H0761: 2, | | |
| | | | | | | | S0376: 2, H0730: 2, S0476: | | |
| | | | | | | | 2, H0550: 2, H0586: 2, | | |
| | | | | | | | H0559: 2, H0486: 2, H0575: | | |
| | | | | | | | 2, H0253: 2, H0581: 2, | | |
| | | | | | | | H0622: 2, H0087: 2, H0059: | | |
| | | | | | | | 2, H0625: 2, H0509: 2, | | |
| | | | | | | | H0649: 2, L3811: 2, L3826: | | |
| | | | | | | | 2, L3204: 2, H0689: 2, | | |
| | | | | | | | H0658: 2, L0581: 2, L0361: | | |
| | | | | | | | 2, S0026: 2, H0543: 2, | | |
| | | | | | | | H0801: 2, H0800: 2, S0424: | | |
| | | | | | | | 2, L3610: 2, H0171: 1, | | |
| | | | | | | | H0556: 1, S0040: 1, H0803: | | |
| | | | | | | | 1, H0255: 1, H0663: 1, | | |
| | | | | | | | H0125: 1, S0356: 1, S0442: | | |
| | | | | | | | 1, S0354: 1, S0408: 1, | | |
| | | | | | | | H0722: 1, H0771: 1, H0776: | | |
| | | | | | | | 1, H0772: 1, H0792: 1, | | |
| | | | | | | | S0278: 1, H0587: 1, L0623: | | |
| | | | | | | | 1, H0250: 1, L0021: 1, | | |
| | | | | | | | H0599: 1, T0082: 1, S0474: | | |
| | | | | | | | 1, H0327: 1, H0530: 1, | | |
| | | | | | | | H0150: 1, L0471: 1, H0012: | | |
| | | | | | | | 1, H0023: 1, H0024: 1, | | |
| | | | | | | | H0014: 1, S0388: 1, H0071: | | |
| | | | | | | | 1, H0107: 1, H0510: 1, | | |
| | | | | | | | H0247: 1, H0271: 1, H0286: | | |
| | | | | | | | 1, H0553: 1, H0181: 1, | | |
| | | | | | | | H0606: 1, H0124: 1, H0316: | | |
| | | | | | | | 1, H0379: 1, H0477: 1, | | |
| | | | | | | | H0100: 1, S0464: 1, S0450: | | |
| | | | | | | | 1, S0438: 1, H0529: 1, | | |
| | | | | | | | L3904: 1, L0523: 1, L0657: | | |
| | | | | | | | 1, L0382: 1, L2262: 1, | | |
| | | | | | | | L5244: 1, L5461: 1, H0698: | | |
| | | | | | | | 1, H0780: 1, H0781: 1, | | |
| | | | | | | | H0762: 1, H0765: 1, H0726: | | |
| | | | | | | | 1, H0519: 1, L3209: 1, | | |
| | | | | | | | H0683: 1, H0684: 1, H0660: | | |
| | | | | | | | 1, H0753: 1, S0146: 1, | | |
| | | | | | | | H0576: 1, S0432: 1, S0027: | | |
| | | | | | | | 1, L0743: 1, L0751: 1, | | |
| | | | | | | | S0031: 1, L0599: 1, H0542: | | |
| | | | | | | | 1, S0456: 1, L4424: 1, | | |
| | | | | | | | L3633: 1 and H0352: 1. | | |
| | HEELL43 | 1343401 | 169 | 469-483 | 351 | | | | |
| 24 | HLEFG68 | 1335798 | 34 | 124-678 | 216 | | H0575: 9, H0042: 1, | | |
| | | | | | | | H0372: 1 and H0768: 1. | | |
| 25 | HERHL91 | 1339169 | 35 | 74-493 | 217 | Ala-24 to Pro-29, | L0809: 4, L0731: 4, L0759: | | |
| | | | | | | Asp-42 to Glu-50, | 4, H0748: 3, L6426: 3, | | |
| | | | | | | Asp-81 to Asn-86, | L0777: 3, S0212: 2, L3649: | | |
| | | | | | | Lys-102 to Gln-108. | 2, L0803: 2, L0789: 2, | | |
| | | | | | | | H0519: 2, H0624: 1, S0040: | | |
| | | | | | | | 1, S0180: 1, H0580: 1, | | |
| | | | | | | | L3387: 1, H0586: 1, H0497: | | |
| | | | | | | | 1, T0040: 1, L3653: 1, | | |
| | | | | | | | H0599: 1, T0082: 1, S0474: | | |
| | | | | | | | 1, S0312: 1, S0314: 1, | | |
| | | | | | | | H0598: 1, H0090: 1, H0551: | | |
| | | | | | | | 1, S0386: 1, H0494: 1, | | |
| | | | | | | | S0150: 1, L7069: 1, L0761: | | |
| | | | | | | | 1, L0764: 1, L0794: 1, | | |
| | | | | | | | L0804: 1, L0805: 1, L0783: | | |
| | | | | | | | 1, L5243: 1, L3824: 1, | | |
| | | | | | | | H0547: 1, H0435: 1, S0380: | | |
| | | | | | | | 1, S0152: 1, L0754: 1, | | |
| | | | | | | | L0749: 1 and L0755: 1. | | |
| | HERHL91 | 1339170 | 170 | 193-633 | 352 | Ala-24 to Pro-29, | | | |
| | | | | | | Asp-42 to Glu-50, | | | |
| | | | | | | Asp-81 to Asn-86, | | | |
| | | | | | | Lys-102 to Gln-108, | | | |
| | | | | | | Arg-126 to Tyr-135. | | | |
| | HERHL91 | 1316906 | 171 | 250-453 | 353 | Leu-20 to Arg-26. | | | |
| 26 | HEFFD22 | 1339724 | 36 | 45-347 | 218 | Ser-40 to Gly-45, | H0351: 10, L0439: 4, | | |
| | | | | | | Phe-90 to Lys-96. | L0766: 3, L3255: 2, L2562: | | |
| | | | | | | | 2, L0775: 2, L0666: 2, | | |
| | | | | | | | L0779: 2, L0780: 2, L0755: | | |
| | | | | | | | 2, L0731: 2, H0772: 1, | | |
| | | | | | | | L3388: 1, H0333: 1, H0486: | | |
| | | | | | | | 1, H0015: 1, H0687: 1, | | |
| | | | | | | | S0422: 1, L6432: 1, L7069: | | |
| | | | | | | | 1, L0761: 1, L6416: 1, | | |
| | | | | | | | L6418: 1, L0776: 1, L0659: | | |
| | | | | | | | 1, L0663: 1, H0682: 1, | | |
| | | | | | | | S0152: 1, L0745: 1, L0752: | | |
| | | | | | | | 1 and S0026: 1. | | |
| 27 | HPCCR42 | 1337796 | 37 | 169-1005 | 219 | Asn-49 to Asn-57, | H0539: 2, H0792: 1, | 16q24.3 | 102600, |
| | | | | | | Pro-86 to Val-95, | H0253: 1, H0059: 1, S0440: | | 155555, |
| | | | | | | Gly-183 to Gly-191, | 1, L0773: 1, H0766: 1 and | | 155555, |
| | | | | | | Ser-244 to Pro-249. | L0602: 1. | | 253000, |
| | | | | | | | | | 600638, |
| | | | | | | | | | 600638, |
| | | | | | | | | | 602402, |
| | | | | | | | | | 602402, |
| | | | | | | | | | 602402, |
| | | | | | | | | | 602402, |
| | | | | | | | | | 602783, |
| | | | | | | | | | 605268, |
| | | | | | | | | | 607139 |
| 28 | HECHI83 | 1337091 | 38 | 333-539 | 220 | Leu-3 to His-9. | L0747: 3, S0260: 3, | | |
| | | | | | | | H0770: 2, S0312: 2, H0124: | | |
| | | | | | | | 2, L6419: 2, L0779: 2, | | |
| | | | | | | | L0777: 2, H0782: 1, H0713: | | |
| | | | | | | | 1, H0716: 1, S0282: 1, | | |
| | | | | | | | H0730: 1, H0735: 1, H0733: | | |
| | | | | | | | 1, S0046: 1, H0772: 1, | | |
| | | | | | | | H0438: 1, H0590: 1, S0010: | | |
| | | | | | | | 1, S0346: 1, S0318: 1, | | |
| | | | | | | | S0340: 1, H0030: 1, H0553: | | |
| | | | | | | | 1, S0038: 1, L0770: 1, | | |
| | | | | | | | L3904: 1, L0790: 1, H0726: | | |
| | | | | | | | 1, H0521: 1, H0555: 1, | | |
| | | | | | | | H0786: 1, S0027: 1 and | | |
| | | | | | | | S0028: 1. | | |
| 29 | HEFEL28 | 1342969 | 39 | 210-635 | 221 | Ala-33 to Gly-38, | S0354: 2, L3388: 2, | Xq22.2 | 300142, |
| | | | | | | Ser-66 to Pro-76. | H0772: 1, H0596: 1, S0214: | | 300324, |
| | | | | | | | 1, H0622: 1, H0644: 1, | | 300405, |
| | | | | | | | L3634: 1, H0756: 1, S0434: | | 301201, |
| | | | | | | | 1, L0581: 1 and L0601: 1. | | 301835, |
| | | | | | | | | | 311850, |
| | | | | | | | | | 314200 |
| 30 | HLCON84 | 1337134 | 40 | 417-737 | 222 | Arg-26 to Pro-32, | L0766: 15, L0744: 9, | 11p15.5 | 125852, |
| | | | | | | Pro-54 to Gly-60, | L0754: 9, L0731: 9, L3827: | | 126452, |
| | | | | | | Gln-67 to Asp-74. | 7, L0748: 7, L0439: 7, | | 126452, |
| | | | | | | | L0771: 5, H0539: 5, L0750: | | 141900, |
| | | | | | | | 5, L0759: 5, H0617: 4, | | 141900, |
| | | | | | | | L0743: 4, L0758: 4, S0222: | | 141900, |
| | | | | | | | 3, L0770: 3, L0769: 3, | | 141900, |
| | | | | | | | L0776: 3, L3828: 3, H0658: | | 141900, |
| | | | | | | | 3, S0404: 3, L0751: 3, | | 141900, |
| | | | | | | | L0749: 3, L0777: 3, L0755: | | 142000, |
| | | | | | | | 3, L0604: 3, H0740: 2, | | 142000, |
| | | | | | | | H0716: 2, H0583: 2, L4888: | | 142200, |
| | | | | | | | 2, S0476: 2, L0586: 2, | | 142250, |
| | | | | | | | H0563: 2, H0083: 2, S0036: | | 176730, |
| | | | | | | | 2, H0494: 2, L0761: 2, | | 176730, |
| | | | | | | | L0374: 2, L0764: 2, L6420: | | 190020, |
| | | | | | | | 2, L0775: 2, L0805: 2, | | 191043, |
| | | | | | | | L0653: 2, H0779: 2, H0547: | | 191290, |
| | | | | | | | 2, H0648: 2, L0747: 2, | | 194071, |
| | | | | | | | L0780: 2, L0752: 2, L0753: | | 194071, |
| | | | | | | | 2, S0436: 2, L0605: 2, | | 204500, |
| | | | | | | | H0170: 1, H0713: 1, S0134: | | 600098, |
| | | | | | | | 1, S0218: 1, H0657: 1, | | 600856, |
| | | | | | | | H0664: 1, H0402: 1, T0008: | | 601680, |
| | | | | | | | 1, L3708: 1, L4948: 1, | | 602063, |
| | | | | | | | S0046: 1, H0747: 1, H0749: | | 602631, |
| | | | | | | | 1, H0351: 1, H0550: 1, | | 602631, |
| | | | | | | | H0391: 1, H0455: 1, H0643: | | 602631, |
| | | | | | | | 1, H0632: 1, H0486: 1, | | 607542, |
| | | | | | | | S0010: 1, T0048: 1, H0581: | | 607542, |
| | | | | | | | 1, H0421: 1, H0052: 1, | | 607542 |
| | | | | | | | H0457: 1, H0086: 1, H0271: | | |
| | | | | | | | 1, H0687: 1, H0553: 1, | | |
| | | | | | | | H0644: 1, H0090: 1, H0038: | | |
| | | | | | | | 1, H0264: 1, H0412: 1, | | |
| | | | | | | | L0564: 1, T0042: 1, S0438: | | |
| | | | | | | | 1, H0767: 1, S0344: 1, | | |
| | | | | | | | L3818: 1, S0002: 1, L0773: | | |
| | | | | | | | 1, L6418: 1, L6419: 1, | | |
| | | | | | | | L6425: 1, L6423: 1, L6421: | | |
| | | | | | | | 1, L0662: 1, L0768: 1, | | |
| | | | | | | | L0794: 1, L0655: 1, L0658: | | |
| | | | | | | | 1, L0659: 1, L6426: 1, | | |
| | | | | | | | L0526: 1, L0783: 1, L0809: | | |
| | | | | | | | 1, L0666: 1, L0664: 1, | | |
| | | | | | | | L0665: 1, L4353: 1, L0438: | | |
| | | | | | | | 1, L3661: 1, L5255: 1, | | |
| | | | | | | | H0593: 1, H0690: 1, H0659: | | |
| | | | | | | | 1, S0380: 1, L3832: 1, | | |
| | | | | | | | S0406: 1, H0785: 1, H0187: | | |
| | | | | | | | 1, H0436: 1, L0779: 1, | | |
| | | | | | | | H0445: 1, L0599: 1, L0608: | | |
| | | | | | | | 1, L0595: 1, H0542: 1, | | |
| | | | | | | | H0543: 1, L3778: 1 and | | |
| | | | | | | | L3803: 1. | | |
| 31 | HLEFK80 | 1335373 | 41 | 95-391 | 223 | Pro-42 to Gly-58, | H0768: 1 | | |
| | | | | | | Met-60 to Glu-65, | | | |
| | | | | | | Pro-67 to Gly-74, | | | |
| | | | | | | Pro-82 to Pro-97. | | | |
| 32 | HLCPQ02 | 1337518 | 42 | 240-455 | 224 | Ser-27 to Trp-43. | S0418: 4, H0617: 4, | 17q23.2-q25.3 | 114290, |
| | | | | | | | H0435: 4, H0295: 3, L0662: | | 114290, |
| | | | | | | | 3, L0794: 3, S0360: 2, | | 114290, |
| | | | | | | | S0002: 2, L0655: 2, L0664: | | 115660, |
| | | | | | | | 2, L2263: 2, L2262: 2, | | 138033, |
| | | | | | | | L0747: 2, H0656: 1, H0370: | | 139250, |
| | | | | | | | 1, H0791: 1, H0309: 1, | | 148500, |
| | | | | | | | H0123: 1, H0024: 1, H0768: | | 150200, |
| | | | | | | | 1, H0767: 1, H0647: 1, | | 154275, |
| | | | | | | | H0646: 1, S0422: 1, L0369: | | 162100, |
| | | | | | | | 1, L0762: 1, L0763: 1, | | 176960, |
| | | | | | | | L0769: 1, L7069: 1, L0772: | | 188830, |
| | | | | | | | 1, L0372: 1, L0800: 1, | | 188830, |
| | | | | | | | L0643: 1, L0644: 1, L0645: | | 188830, |
| | | | | | | | 1, L0764: 1, L0773: 1, | | 188830, |
| | | | | | | | L0363: 1, L0766: 1, L0381: | | 264470, |
| | | | | | | | 1, L0388: 1, L0658: 1, | | 600681, |
| | | | | | | | L0382: 1, L0367: 1, L5623: | | 602723, |
| | | | | | | | 1, L0792: 1, L0666: 1, | | 603967, |
| | | | | | | | L0665: 1, L2651: 1, L2653: | | 603967, |
| | | | | | | | 1, L2264: 1, L2654: 1, | | 603967, |
| | | | | | | | H0658: 1, H0672: 1, H0754: | | 603967, |
| | | | | | | | 1, L0750: 1, L0779: 1, | | 603967, |
| | | | | | | | L0777: 1, L0780: 1, L2048: | | 604025, |
| | | | | | | | 1, S0436: 1, S0424: 1 and | | 604061, |
| | | | | | | | H0506: 1. | | 604061, |
| | | | | | | | | | 604313, |
| | | | | | | | | | 604717, |
| | | | | | | | | | 604717, |
| | | | | | | | | | 605270, |
| | | | | | | | | | 605805, |
| | | | | | | | | | 605828, |
| | | | | | | | | | 605829, |
| | | | | | | | | | 606236, |
| | | | | | | | | | 606521, |
| | | | | | | | | | 606800, |
| | | | | | | | | | 607151, |
| | | | | | | | | | 607696 |
| 33 | HLEFR48 | 1338572 | 43 | 270-683 | 225 | Met-1 to Pro-6, | S0410: 14, H0521: 13, | 20q13.1 | 109535, |
| | | | | | | Gly-53 to Gln-58, | L0751: 13, H0545: 10, | | 176885, |
| | | | | | | His-62 to Gly-70, | H0052: 9, H0253: 6, H0271: | | 256540, |
| | | | | | | Pro-115 to Asp-121. | 6, H0641: 6, L0666: 6, | | 600281, |
| | | | | | | | L0743: 6, L0659: 5, L0758: | | 600281, |
| | | | | | | | 5, H0250: 4, S0051: 4, | | 603694 |
| | | | | | | | H0135: 4, L0521: 4, L0519: | | |
| | | | | | | | 4, L0665: 4, L0438: 4, | | |
| | | | | | | | H0522: 4, S0436: 4, H0295: | | |
| | | | | | | | 3, H0255: 3, H0638: 3, | | |
| | | | | | | | S0444: 3, L5054: 3, H0486: | | |
| | | | | | | | 3, H0546: 3, H0509: 3, | | |
| | | | | | | | L3905: 3, L0768: 3, L0744: | | |
| | | | | | | | 3, L0749: 3, L0756: 3, | | |
| | | | | | | | L0753: 3, H0556: 2, L2884: | | |
| | | | | | | | 2, H0776: 2, H0441: 2, | | |
| | | | | | | | H0370: 2, H0427: 2, H0618: | | |
| | | | | | | | 2, H0581: 2, H0620: 2, | | |
| | | | | | | | L4788: 2, H0617: 2, L0455: | | |
| | | | | | | | 2, H0413: 2, H0059: 2, | | |
| | | | | | | | H0494: 2, L0770: 2, L0638: | | |
| | | | | | | | 2, L3904: 2, L6417: 2, | | |
| | | | | | | | L0649: 2, L0774: 2, L0653: | | |
| | | | | | | | 2, L0776: 2, L0661: 2, | | |
| | | | | | | | L0663: 2, L5312: 2, H0693: | | |
| | | | | | | | 2, H0435: 2, H0658: 2, | | |
| | | | | | | | S0328: 2, H0539: 2, L0602: | | |
| | | | | | | | 2, L0439: 2, H0445: 2, | | |
| | | | | | | | L0591: 2, L0593: 2, L5105: | | |
| | | | | | | | 2, L3626: 2, H0721: 1, | | |
| | | | | | | | H0782: 1, H0265: 1, H0727: | | |
| | | | | | | | 1, H0685: 1, H0713: 1, | | |
| | | | | | | | H0717: 1, H0716: 1, H0657: | | |
| | | | | | | | 1, S0298: 1, H0483: 1, | | |
| | | | | | | | H0662: 1, S0420: 1, S0442: | | |
| | | | | | | | 1, S0358: 1, H0675: 1, | | |
| | | | | | | | H0637: 1, H0580: 1, H0733: | | |
| | | | | | | | 1, H0772: 1, L5080: 1, | | |
| | | | | | | | H0619: 1, S0278: 1, H0550: | | |
| | | | | | | | 1, S6016: 1, H0602: 1, | | |
| | | | | | | | H0586: 1, H0574: 1, L3739: | | |
| | | | | | | | 1, L2490: 1, S0049: 1, | | |
| | | | | | | | H0309: 1, H0327: 1, H0544: | | |
| | | | | | | | 1, H0572: 1, H0172: 1, | | |
| | | | | | | | H0050: 1, H0015: 1, T0010: | | |
| | | | | | | | 1, H0510: 1, H0266: 1, | | |
| | | | | | | | H0687: 1, H0286: 1, S0312: | | |
| | | | | | | | 1, S0314: 1, H0428: 1, | | |
| | | | | | | | T0023: 1, H0553: 1, H0606: | | |
| | | | | | | | 1, H0212: 1, S0364: 1, | | |
| | | | | | | | L0456: 1, S0366: 1, S0036: | | |
| | | | | | | | 1, H0040: 1, H0634: 1, | | |
| | | | | | | | H0551: 1, H0412: 1, T0042: | | |
| | | | | | | | 1, H0560: 1, H0561: 1, | | |
| | | | | | | | H0207: 1, H0768: 1, H0633: | | |
| | | | | | | | 1, H0647: 1, H0646: 1, | | |
| | | | | | | | S0142: 1, H0529: 1, L0369: | | |
| | | | | | | | 1, L0769: 1, L6432: 1, | | |
| | | | | | | | L0644: 1, L7065: 1, L6414: | | |
| | | | | | | | 1, L6418: 1, L0767: 1, | | |
| | | | | | | | L0766: 1, L0386: 1, L0775: | | |
| | | | | | | | 1, L0806: 1, L0807: 1, | | |
| | | | | | | | L0657: 1, L0658: 1, L0529: | | |
| | | | | | | | 1, L5622: 1, L0788: 1, | | |
| | | | | | | | L0664: 1, L4772: 1, L2258: | | |
| | | | | | | | 1, L2260: 1, L5244: 1, | | |
| | | | | | | | L2654: 1, L5306: 1, L0352: | | |
| | | | | | | | 1, L2695: 1, H0547: 1, | | |
| | | | | | | | S0126: 1, H0690: 1, H0682: | | |
| | | | | | | | 1, H0660: 1, H0518: 1, | | |
| | | | | | | | S0152: 1, H0694: 1, H0786: | | |
| | | | | | | | 1, H0789: 1, S0392: 1, | | |
| | | | | | | | S0028: 1, L0742: 1, L0747: | | |
| | | | | | | | 1, L0731: 1, L0759: 1, | | |
| | | | | | | | H0707: 1, L0592: 1, L0366: | | |
| | | | | | | | 1, H0423: 1, H0506: 1, | | |
| | | | | | | | L3603: 1 and L3620: 1. | | |
| 34 | HEFFA92 | 1344603 | 44 | 98-841 | 226 | Gly-76 to Leu-83, | H0494: 7, H0586: 5, | | |
| | | | | | | Ala-108 to Glu-113, | S0330: 5, H0772: 4, H0770: | | |
| | | | | | | Ala-126 to Lys-132, | 3, H0781: 3, H0602: 2, | | |
| | | | | | | Gly-145 to Leu-151, | H0587: 2, L0806: 2, L0747: | | |
| | | | | | | Gln-161 to Val-166, | 2, H0081: 1, S0250: 1, | | |
| | | | | | | Ala-180 to Gln-185, | H0708: 1, L0648: 1, L0376: | | |
| | | | | | | Gly-190 to Ala-198, | 1, L5623: 1, H0780: 1, | | |
| | | | | | | Asn-203 to Gly-216. | S0328: 1, H0521: 1 and | | |
| | | | | | | | S3014: 1. | | |
| 35 | HLEFF44 | 1345360 | 45 | 1705-2067 | 227 | Ser-66 to Thr-75, | | 1q25.1-q32.3 | 114208, |
| | | | | | | Pro-101 to Arg-106. | | | 114208, |
| | | | | | | | | | 120502, |
| | | | | | | | | | 120620, |
| | | | | | | | | | 120620, |
| | | | | | | | | | 120620, |
| | | | | | | | | | 120920, |
| | | | | | | | | | 134370, |
| | | | | | | | | | 134370, |
| | | | | | | | | | 134370, |
| | | | | | | | | | 134370, |
| | | | | | | | | | 134580, |
| | | | | | | | | | 145260, |
| | | | | | | | | | 150292, |
| | | | | | | | | | 150292, |
| | | | | | | | | | 150310, |
| | | | | | | | | | 150310, |
| | | | | | | | | | 151460, |
| | | | | | | | | | 151460, |
| | | | | | | | | | 179820, |
| | | | | | | | | | 191045, |
| | | | | | | | | | 191045, |
| | | | | | | | | | 226450, |
| | | | | | | | | | 600031, |
| | | | | | | | | | 600759, |
| | | | | | | | | | 600995, |
| | | | | | | | | | 601652, |
| | | | | | | | | | 601652, |
| | | | | | | | | | 601652, |
| | | | | | | | | | 601894, |
| | | | | | | | | | 601975, |
| | | | | | | | | | 603075, |
| | | | | | | | | | 604210, |
| | | | | | | | | | 604210, |
| | | | | | | | | | 604766, |
| | | | | | | | | | 605481, |
| | | | | | | | | | 607199, |
| | | | | | | | | | 607199, |
| | | | | | | | | | 607393, |
| | | | | | | | | | 607393, |
| | | | | | | | | | 607393, |
| | | | | | | | | | 607516, |
| | | | | | | | | | 607516 |
| 36 | HLCOG83 | 1336780 | 46 | 28-321 | 228 | Ser-35 to Thr-45, | H0770: 3, H0773: 2, | | |
| | | | | | | Asn-92 to Asp-97. | H0781: 2, H0772: 1, H0592: | | |
| | | | | | | | 1, H0081: 1, H0099: 1, | | |
| | | | | | | | S0448: 1, H0767: 1, L0764: | | |
| | | | | | | | 1, L0648: 1, H0780: 1 and | | |
| | | | | | | | S0328: 1. | | |
| 37 | HLEFV31 | 1335799 | 47 | 80-499 | 229 | Pro-57 to Gly-73, | H0575: 1 and H0768: 1. | | |
| | | | | | | Pro-82 to Gly-89, | | | |
| | | | | | | Cys-100 to Pro-112. | | | |
| 38 | HLCOW38 | 1339959 | 48 | 56-538 | 230 | Leu-24 to Gly-32, | L0755: 22, H0521: 16, | 22q12.3-q13.2 | 102480, |
| | | | | | | Pro-60 to Arg-70. | H0271: 10, L0766: 9, | | 103050, |
| | | | | | | | H0618: 7, L0771: 7, L0659: | | 103050, |
| | | | | | | | 7, S0126: 7, L0757: 7, | | 124030, |
| | | | | | | | L0601: 7, H0253: 6, L0751: | | 124030, |
| | | | | | | | 6, H0556: 5, H0580: 5, | | 138981, |
| | | | | | | | H0551: 5, H0646: 5, L0774: | | 156100, |
| | | | | | | | 5, L0806: 5, L0665: 5, | | 182380, |
| | | | | | | | L3832: 5, L0758: 5, H0492: | | 188826, |
| | | | | | | | 4, L0770: 4, H0593: 4, | | 190040, |
| | | | | | | | H0435: 4, S0420: 3, S0132: | | 190040, |
| | | | | | | | 3, H0600: 3, H0457: 3, | | 190040, |
| | | | | | | | H0767: 3, L0769: 3, L0794: | | 218040, |
| | | | | | | | 3, L0776: 3, L0789: 3, | | 600850, |
| | | | | | | | S0152: 3, L0740: 3, L0747: | | 602049, |
| | | | | | | | 3, L0779: 3, L0777: 3, | | 602229, |
| | | | | | | | L0731: 3, S0436: 3, H0653: | | 602229, |
| | | | | | | | 3, H0265: 2, S0212: 2, | | 602229, |
| | | | | | | | S0356: 2, S0360: 2, S0278: | | 602700, |
| | | | | | | | 2, H0791: 2, H0250: 2, | | 603516, |
| | | | | | | | H0599: 2, H0581: 2, H0046: | | 603590, |
| | | | | | | | 2, H0266: 2, H0416: 2, | | 603743, |
| | | | | | | | H0553: 2, H0494: 2, H0561: | | 604272, |
| | | | | | | | 2, H0641: 2, L3818: 2, | | 606078, |
| | | | | | | | L5565: 2, L7069: 2, L0764: | | 607252, |
| | | | | | | | 2, L0773: 2, L0648: 2, | | 607254 |
| | | | | | | | L0804: 2, L0775: 2, L0807: | | |
| | | | | | | | 2, L5622: 2, S0428: 2, | | |
| | | | | | | | L0708: 2, L0710: 2, L2261: | | |
| | | | | | | | 2, H0753: 2, H0522: 2, | | |
| | | | | | | | L0750: 2, L0604: 2, S0194: | | |
| | | | | | | | 2, H0801: 2, L3580: 2, | | |
| | | | | | | | H0141: 1, H0585: 1, H0717: | | |
| | | | | | | | 1, S0116: 1, S0180: 1, | | |
| | | | | | | | H0661: 1, H0638: 1, S0418: | | |
| | | | | | | | 1, S0442: 1, S0444: 1, | | |
| | | | | | | | L3888: 1, H0728: 1, H0735: | | |
| | | | | | | | 1, H0734: 1, S0045: 1, | | |
| | | | | | | | S0046: 1, S0476: 1, H0771: | | |
| | | | | | | | 1, L5032: 1, H0619: 1, | | |
| | | | | | | | H0393: 1, L5442: 1, H0550: | | |
| | | | | | | | 1, H0438: 1, H0586: 1, | | |
| | | | | | | | H0587: 1, H0497: 1, H0559: | | |
| | | | | | | | 1, H0486: 1, L2480: 1, | | |
| | | | | | | | H0069: 1, H0575: 1, T0048: | | |
| | | | | | | | 1, S0474: 1, H0744: 1, | | |
| | | | | | | | H0263: 1, H0327: 1, H0544: | | |
| | | | | | | | 1, T0010: 1, H0510: 1, | | |
| | | | | | | | H0594: 1, H0179: 1, H0719: | | |
| | | | | | | | 1, H0292: 1, H0286: 1, | | |
| | | | | | | | H0252: 1, H0039: 1, L0055: | | |
| | | | | | | | 1, H0634: 1, H0477: 1, | | |
| | | | | | | | H0056: 1, H0059: 1, H0100: | | |
| | | | | | | | 1, H0560: 1, L4801: 1, | | |
| | | | | | | | H0132: 1, H0130: 1, H0768: | | |
| | | | | | | | 1, S0210: 1, L5145: 1, | | |
| | | | | | | | H0529: 1, L0640: 1, L0763: | | |
| | | | | | | | 1, L0637: 1, L0761: 1, | | |
| | | | | | | | L0667: 1, L0772: 1, L0800: | | |
| | | | | | | | 1, L0643: 1, L6420: 1, | | |
| | | | | | | | L6417: 1, L6425: 1, L0768: | | |
| | | | | | | | 1, L0803: 1, L0653: 1, | | |
| | | | | | | | L0654: 1, L0382: 1, L5623: | | |
| | | | | | | | 1, L0368: 1, L0793: 1, | | |
| | | | | | | | L0664: 1, L0709: 1, L2260: | | |
| | | | | | | | 1, L2262: 1, L3667: 1, | | |
| | | | | | | | L5460: 1, L5462: 1, L2392: | | |
| | | | | | | | 1, L0565: 1, H0726: 1, | | |
| | | | | | | | L3827: 1, L3207: 1, H0683: | | |
| | | | | | | | 1, H0539: 1, H0754: 1, | | |
| | | | | | | | H0518: 1, L0716: 1, H0528: | | |
| | | | | | | | 1, H0555: 1, H0784: 1, | | |
| | | | | | | | H0785: 1, H0789: 1, S3014: | | |
| | | | | | | | 1, S0028: 1, S0032: 1, | | |
| | | | | | | | L0743: 1, L0745: 1, L0746: | | |
| | | | | | | | 1, L0759: 1, L0589: 1, | | |
| | | | | | | | L0595: 1, L0361: 1, H0665: | | |
| | | | | | | | 1, S0192: 1, H0542: 1 and | | |
| | | | | | | | H0800: 1. | | |
| 39 | HEFEP03 | 1344605 | 49 | 239-706 | 231 | Asn-47 to His-58, | L3828: 13, H0547: 10, | 16p12-p11.2 | 108730, |
| | | | | | | Leu-147 to Glu-155. | H0046: 8, L3827: 8, H0521: | | 117800, |
| | | | | | | | 7, H0494: 6, L3832: 6, | | 128200, |
| | | | | | | | H0266: 5, H0522: 4, S0222: | | 147781, |
| | | | | | | | 3, H0013: 3, L0483: 3, | | 157700, |
| | | | | | | | H0090: 3, L3831: 3, H0754: | | 162000, |
| | | | | | | | 3, L3839: 3, H0721: 2, | | 172471, |
| | | | | | | | S0040: 2, H0656: 2, L3814: | | 182381, |
| | | | | | | | 2, H0402: 2, S0418: 2, | | 600760, |
| | | | | | | | S0420: 2, S0007: 2, H0497: | | 600760, |
| | | | | | | | 2, S0010: 2, L0471: 2, | | 600761, |
| | | | | | | | L0455: 2, H0561: 2, L3826: | | 600761, |
| | | | | | | | 2, H0520: 2, H0519: 2, | | 602066, |
| | | | | | | | S0126: 2, L0439: 2, L0588: | | 603795, |
| | | | | | | | 2, L0599: 2, S0194: 2, | | 603860, |
| | | | | | | | L3837: 2, L5222: 2, H0782: | | 605751, |
| | | | | | | | 1, H0624: 1, H0171: 1, | | 607473 |
| | | | | | | | H0727: 1, S0218: 1, H0803: | | |
| | | | | | | | 1, H0341: 1, H0638: 1, | | |
| | | | | | | | H0125: 1, S0442: 1, S0376: | | |
| | | | | | | | 1, S0410: 1, H0777: 1, | | |
| | | | | | | | H0772: 1, H0592: 1, L3816: | | |
| | | | | | | | 1, L3817: 1, T0039: 1, | | |
| | | | | | | | L2640: 1, H0250: 1, S0280: | | |
| | | | | | | | 1, H0575: 1, H0390: 1, | | |
| | | | | | | | T0048: 1, L0738: 1, H0009: | | |
| | | | | | | | 1, H0057: 1, H0051: 1, | | |
| | | | | | | | H0083: 1, H0355: 1, H0179: | | |
| | | | | | | | 1, H0271: 1, H0687: 1, | | |
| | | | | | | | S0250: 1, S0003: 1, H0428: | | |
| | | | | | | | 1, H0622: 1, H0553: 1, | | |
| | | | | | | | H0169: 1, S0036: 1, H0551: | | |
| | | | | | | | 1, T0042: 1, H0641: 1, | | |
| | | | | | | | H0633: 1, S0144: 1, H0142: | | |
| | | | | | | | 1, H0529: 1, L0796: 1, | | |
| | | | | | | | L3905: 1, L7069: 1, L0768: | | |
| | | | | | | | 1, L0561: 1, L0560: 1, | | |
| | | | | | | | L0558: 1, L0809: 1, L0545: | | |
| | | | | | | | 1, L0790: 1, L0792: 1, | | |
| | | | | | | | L3820: 1, L3391: 1, L2652: | | |
| | | | | | | | 1, L2257: 1, L2260: 1, | | |
| | | | | | | | L0710: 1, L3641: 1, L5241: | | |
| | | | | | | | 1, L5389: 1, L5243: 1, | | |
| | | | | | | | H0144: 1, H0702: 1, H0703: | | |
| | | | | | | | 1, L5370: 1, S0374: 1, | | |
| | | | | | | | L0565: 1, L3825: 1, H0435: | | |
| | | | | | | | 1, H0660: 1, H0518: 1, | | |
| | | | | | | | H0436: 1, L0748: 1, L0749: | | |
| | | | | | | | 1, L0753: 1, L2197: 1, | | |
| | | | | | | | S0434: 1, S0436: 1, L0592: | | |
| | | | | | | | 1, H0665: 1, H0542: 1, | | |
| | | | | | | | H0802: 1, H0800: 1 and | | |
| | | | | | | | S0424: 1. | | |
| 40 | HEFFD82 | 1344613 | 50 | 247-816 | 232 | Lys-27 to Glu-35, | L0744: 35, H0733: 15, | 3q26.2-qter | |
| | | | | | | Arg-151 to Pro-156. | T0006: 15, S0031: 15, | | |
| | | | | | | | H0772: 12, S0222: 12, | | |
| | | | | | | | L0742: 12, H0427: 8, | | |
| | | | | | | | S0282: 7, L5401: 7, S0366: | | |
| | | | | | | | 7, H0713: 6, H0771: 6, | | |
| | | | | | | | S0010: 6, S0051: 6, L0743: | | |
| | | | | | | | 6, L0754: 6, S0260: 6, | | |
| | | | | | | | H0739: 5, H0716: 5, H0728: | | |
| | | | | | | | 5, H0051: 5, S0036: 5, | | |
| | | | | | | | L0604: 5, H0782: 4, T0060: | | |
| | | | | | | | 4, S0334: 4, S0364: 4, | | |
| | | | | | | | H0063: 4, L0655: 4, S0330: | | |
| | | | | | | | 4, L0747: 4, L4884: 3, | | |
| | | | | | | | H0662: 3, H0729: 3, H0586: | | |
| | | | | | | | 3, H0052: 3, H0327: 3, | | |
| | | | | | | | L4788: 3, H0188: 3, S0318: | | |
| | | | | | | | 3, S0336: 3, S0316: 3, | | |
| | | | | | | | S0312: 3, H0031: 3, H0644: | | |
| | | | | | | | 3, H0090: 3, S0038: 3, | | |
| | | | | | | | L0662: 3, H0766: 3, L0749: | | |
| | | | | | | | 3, L0758: 3, L0589: 3, | | |
| | | | | | | | H0669: 2, S0358: 2, S0360: | | |
| | | | | | | | 2, H0734: 2, H0770: 2, | | |
| | | | | | | | S6016: 2, H0441: 2, H0370: | | |
| | | | | | | | 2, L0623: 2, H0599: 2, | | |
| | | | | | | | H0618: 2, S0346: 2, S0049: | | |
| | | | | | | | 2, H0373: 2, S0340: 2, | | |
| | | | | | | | S0314: 2, H0328: 2, H0708: | | |
| | | | | | | | 2, S0464: 2, L0665: 2, | | |
| | | | | | | | H0780: 2, L5273: 2, H0658: | | |
| | | | | | | | 2, H0672: 2, S0044: 2, | | |
| | | | | | | | L0439: 2, L0753: 2, L0731: | | |
| | | | | | | | 2, S0434: 2, L0600: 2, | | |
| | | | | | | | S6024: 1, S0116: 1, S0110: | | |
| | | | | | | | 1, S0030: 1, H0664: 1, | | |
| | | | | | | | L4868: 1, S0442: 1, S0444: | | |
| | | | | | | | 1, L3645: 1, H0735: 1, | | |
| | | | | | | | S0300: 1, H0462: 1, H0431: | | |
| | | | | | | | 1, L3503: 1, L3655: 1, | | |
| | | | | | | | S0280: 1, L0021: 1, T0082: | | |
| | | | | | | | 1, H0421: 1, H0363: 1, | | |
| | | | | | | | H0310: 1, H0194: 1, H0044: | | |
| | | | | | | | 1, H0081: 1, S0388: 1, | | |
| | | | | | | | H0399: 1, H0594: 1, S6028: | | |
| | | | | | | | 1, H0110: 1, H0622: 1, | | |
| | | | | | | | H0553: 1, L0142: 1, H0087: | | |
| | | | | | | | 1, T0069: 1, T0004: 1, | | |
| | | | | | | | S0112: 1, L0435: 1, L0769: | | |
| | | | | | | | 1, L3904: 1, L3905: 1, | | |
| | | | | | | | L0772: 1, L0773: 1, L0784: | | |
| | | | | | | | 1, L0659: 1, L0526: 1, | | |
| | | | | | | | L0783: 1, L0530: 1, L4779: | | |
| | | | | | | | 1, L3639: 1, L3641: 1, | | |
| | | | | | | | H0144: 1, L4347: 1, L4350: | | |
| | | | | | | | 1, H0725: 1, H0723: 1, | | |
| | | | | | | | H0757: 1, H0724: 1, H0783: | | |
| | | | | | | | 1, L3811: 1, H0752: 1, | | |
| | | | | | | | H0521: 1, S3012: 1, S0390: | | |
| | | | | | | | 1, S0027: 1, L0741: 1, | | |
| | | | | | | | L0748: 1, L0777: 1, L0755: | | |
| | | | | | | | 1, L0759: 1, S0436: 1, | | |
| | | | | | | | L0485: 1, S0106: 1, S0192: | | |
| | | | | | | | 1 and L2847: 1. | | |
| 41 | HECHH44 | 1353379 | 51 | 60-842 | 233 | Gln-32 to Cys-37, | H0770: 1 | 12q21.3-q22 | 147440, |
| | | | | | | Asn-42 to Pro-48. | | | 235800, |
| | | | | | | | | | 273300, |
| | | | | | | | | | 603221, |
| | | | | | | | | | 603288, |
| | | | | | | | | | 605583, |
| | | | | | | | | | 606885 |
| 42 | HLEGA47 | 1335348 | 52 | 49-408 | 234 | Ala-56 to Val-63. | H0768: 1 | | |
| 43 | HEDBJ79 | 1344635 | 53 | 1705-2067 | 235 | Ser-66 to Thr-75, | H0622: 3, L0659: 3, | 1q25.1-q32.3 | 114208, |
| | | | | | | Pro-101 to Arg-106. | H0670: 3, S0408: 2, H0606: | | 114208, |
| | | | | | | | 2, L4815: 2, L0646: 2, | | 120502, |
| | | | | | | | L0771: 2, L0774: 2, L0666: | | 120620, |
| | | | | | | | 2, H0295: 1, H0484: 1, | | 120620, |
| | | | | | | | S0358: 1, S0410: 1, H0771: | | 120620, |
| | | | | | | | 1, L3281: 1, H0549: 1, | | 120920, |
| | | | | | | | H0250: 1, H0090: 1, L4817: | | 134370, |
| | | | | | | | 1, L0639: 1, L0372: 1, | | 134370, |
| | | | | | | | L0643: 1, L0374: 1, L6414: | | 134370, |
| | | | | | | | 1, L0648: 1, L0662: 1, | | 134370, |
| | | | | | | | L0649: 1, L0560: 1, L0806: | | 134580, |
| | | | | | | | 1, L0527: 1, L0657: 1, | | 145260, |
| | | | | | | | L6427: 1, L0783: 1, L0383: | | 150292, |
| | | | | | | | 1, L0790: 1, L2257: 1, | | 150292, |
| | | | | | | | S0378: 1, L0602: 1, H0774: | | 150310, |
| | | | | | | | 1, S0406: 1, L0748: 1, | | 150310, |
| | | | | | | | L0777: 1, L0780: 1, L0755: | | 151460, |
| | | | | | | | 1, L0601: 1 and L5238: 1. | | 151460, |
| | | | | | | | | | 179820, |
| | | | | | | | | | 191045, |
| | | | | | | | | | 191045, |
| | | | | | | | | | 226450, |
| | | | | | | | | | 600031, |
| | | | | | | | | | 600759, |
| | | | | | | | | | 600995, |
| | | | | | | | | | 601652, |
| | | | | | | | | | 601652, |
| | | | | | | | | | 601652, |
| | | | | | | | | | 601894, |
| | | | | | | | | | 601975, |
| | | | | | | | | | 603075, |
| | | | | | | | | | 604210, |
| | | | | | | | | | 604210, |
| | | | | | | | | | 604766, |
| | | | | | | | | | 605481, |
| | | | | | | | | | 607199, |
| | | | | | | | | | 607199, |
| | | | | | | | | | 607393, |
| | | | | | | | | | 607393, |
| | | | | | | | | | 607393, |
| | | | | | | | | | 607516, |
| | | | | | | | | | 607516 |
| 44 | HEEML62 | 1344608 | 54 | 27-920 | 236 | Val-19 to Tyr-28, | S0438: 36, L0581: 31, | 7q22.1 | 120160, |
| | | | | | | Tyr-61 to Gln-69, | L0748: 16, H0722: 14, | | 120160, |
| | | | | | | Met-80 to Arg-93, | H0510: 14, L0744: 14, | | 120160, |
| | | | | | | Tyr-107 to Gly-113, | H0696: 13, H0673: 12, | | 120160, |
| | | | | | | Glu-126 to Ser-131, | L3388: 10, H0188: 10, | | 126650, |
| | | | | | | Tyr-138 to Asp-143, | H0674: 10, H0741: 9, | | 126650 |
| | | | | | | Ile-163 to Glu-169, | L0747: 9, H0014: 8, L0809: | | |
| | | | | | | Leu-194 to Asn-199, | 8, S0330: 8, H0574: 7, | | |
| | | | | | | Leu-201 to Pro-207, | S0380: 7, H0617: 6, S0328: | | |
| | | | | | | Gln-215 to Lys-222, | 6, H0661: 5, H0730: 5, | | |
| | | | | | | Val-245 to Arg-251, | H0586: 5, L5622: 5, H0478: | | |
| | | | | | | Pro-272 to Tyr-278. | 5, H0393: 4, H0587: 4, | | |
| | | | | | | | L0774: 4, L0783: 4, L0743: | | |
| | | | | | | | 4, L0777: 4, H0663: 3, | | |
| | | | | | | | H0664: 3, H0662: 3, L3295: | | |
| | | | | | | | 3, H0169: 3, L0764: 3, | | |
| | | | | | | | L0806: 3, L0526: 3, L0782: | | |
| | | | | | | | 3, L0384: 3, L0529: 3, | | |
| | | | | | | | L0543: 3, L3641: 3, S0044: | | |
| | | | | | | | 3, L0758: 3, L3041: 2, | | |
| | | | | | | | S0444: 2, H0742: 2, L2817: | | |
| | | | | | | | 2, H0370: 2, H0331: 2, | | |
| | | | | | | | H0599: 2, H0015: 2, H0383: | | |
| | | | | | | | 2, H0165: 2, S0440: 2, | | |
| | | | | | | | H0509: 2, H0646: 2, L0763: | | |
| | | | | | | | 2, L0773: 2, L0541: 2, | | |
| | | | | | | | H0716: 1, H0484: 1, H0669: | | |
| | | | | | | | 1, L0988: 1, S0348: 1, | | |
| | | | | | | | S0442: 1, S0354: 1, S0360: | | |
| | | | | | | | 1, L2255: 1, S0222: 1, | | |
| | | | | | | | H0592: 1, H0642: 1, H0632: | | |
| | | | | | | | 1, L2647: 1, H0427: 1, | | |
| | | | | | | | L0021: 1, H0744: 1, H0545: | | |
| | | | | | | | 1, H0197: 1, H0199: 1, | | |
| | | | | | | | H0239: 1, H0092: 1, H0181: | | |
| | | | | | | | 1, H0032: 1, H0166: 1, | | |
| | | | | | | | S0016: 1, S0464: 1, H0773: | | |
| | | | | | | | 1, L0762: 1, L0640: 1, | | |
| | | | | | | | L0631: 1, L0772: 1, L0771: | | |
| | | | | | | | 1, L6418: 1, L0659: 1, | | |
| | | | | | | | L0540: 1, L0518: 1, L0528: | | |
| | | | | | | | 1, L5623: 1, L0788: 1, | | |
| | | | | | | | H0757: 1, H0764: 1, H0658: | | |
| | | | | | | | 1, S0378: 1, H0766: 1, | | |
| | | | | | | | S0406: 1, H0785: 1, S0392: | | |
| | | | | | | | 1, H0479: 1, S0434: 1, | | |
| | | | | | | | L0596: 1 and L0362: 1. | | |
| 45 | HEELB16 | 1344619 | 55 | 545-1639 | 237 | Leu-28 to Thr-33, | L0771: 6, L0666: 5, L0803: | 14q11.2 | 162080, |
| | | | | | | Gly-36 to Gly-47, | 4, L0805: 4, L0809: 4, | | 182600, |
| | | | | | | Pro-202 to Asn-207, | L0743: 4, L0770: 3, L0769: | | 186880, |
| | | | | | | Glu-211 to Lys-219, | 3, L0664: 3, L0665: 3, | | 190195, |
| | | | | | | Gly-249 to Thr-254, | L0439: 3, L0779: 3, L0752: | | 190195, |
| | | | | | | Ser-283 to Trp-290. | 3, L0757: 3, H0265: 2, | | 190195, |
| | | | | | | | H0585: 2, S0376: 2, H0771: | | 600243, |
| | | | | | | | 2, L2799: 2, H0392: 2, | | 602279, |
| | | | | | | | H0409: 2, L3816: 2, H0013: | | 602279, |
| | | | | | | | 2, H0135: 2, H0551: 2, | | 603593, |
| | | | | | | | H0494: 2, L0659: 2, L5300: | | 605463, |
| | | | | | | | 2, H0519: 2, H0658: 2, | | 606439, |
| | | | | | | | H0670: 2, H0521: 2, L0744: | | 606675 |
| | | | | | | | 2, L0740: 2, L0780: 2, | | |
| | | | | | | | L0731: 2, L0758: 2, S0276: | | |
| | | | | | | | 2, L3618: 2, H0556: 1, | | |
| | | | | | | | H0141: 1, S0342: 1, H0295: | | |
| | | | | | | | 1, T0049: 1, L2910: 1, | | |
| | | | | | | | S0212: 1, H0484: 1, L3861: | | |
| | | | | | | | 1, S0418: 1, S0442: 1, | | |
| | | | | | | | S0358: 1, S0444: 1, H0580: | | |
| | | | | | | | 1, S0007: 1, S0045: 1, | | |
| | | | | | | | S0476: 1, H0772: 1, L3104: | | |
| | | | | | | | 1, L0717: 1, H0549: 1, | | |
| | | | | | | | H0370: 1, H0791: 1, L2504: | | |
| | | | | | | | 1, L2570: 1, S0010: 1, | | |
| | | | | | | | S0346: 1, H0581: 1, S0049: | | |
| | | | | | | | 1, H0263: 1, H0046: 1, | | |
| | | | | | | | H0009: 1, H0123: 1, H0266: | | |
| | | | | | | | 1, H0687: 1, L0483: 1, | | |
| | | | | | | | H0030: 1, H0644: 1, S0366: | | |
| | | | | | | | 1, H0038: 1, T0067: 1, | | |
| | | | | | | | H0413: 1, H0334: 1, L0065: | | |
| | | | | | | | 1, S0440: 1, S0142: 1, | | |
| | | | | | | | H0773: 1, S0002: 1, S0426: | | |
| | | | | | | | 1, L0763: 1, L3905: 1, | | |
| | | | | | | | L0761: 1, L0646: 1, L0764: | | |
| | | | | | | | 1, L0773: 1, L6420: 1, | | |
| | | | | | | | L6415: 1, L0662: 1, L0794: | | |
| | | | | | | | 1, L0804: 1, L0775: 1, | | |
| | | | | | | | L0806: 1, L0527: 1, L0782: | | |
| | | | | | | | 1, L0789: 1, L0790: 1, | | |
| | | | | | | | L0791: 1, L0793: 1, L3871: | | |
| | | | | | | | 1, L3820: 1, L2257: 1, | | |
| | | | | | | | L2259: 1, L2260: 1, L3641: | | |
| | | | | | | | 1, L2654: 1, L5312: 1, | | |
| | | | | | | | S0148: 1, H0593: 1, H0682: | | |
| | | | | | | | 1, H0684: 1, H0435: 1, | | |
| | | | | | | | S0328: 1, S0380: 1, H0754: | | |
| | | | | | | | 1, H0753: 1, L3834: 1, | | |
| | | | | | | | H0696: 1, S0044: 1, S0146: | | |
| | | | | | | | 1, S0392: 1, H0627: 1, | | |
| | | | | | | | S0027: 1, L0750: 1, L0777: | | |
| | | | | | | | 1, L0759: 1, S0434: 1, | | |
| | | | | | | | S0026: 1, H0665: 1, H0136: | | |
| | | | | | | | 1 and H0542: 1. | | |
| 46 | HEDBH12 | 1353380 | 56 | 47-256 | 238 | Ser-25 to Cys-35, | H0771: 1 | 4q12 | 103600, |
| | | | | | | Ala-64 to Pro-70. | | | 103600, |
| | | | | | | | | | 103600, |
| | | | | | | | | | 104150, |
| | | | | | | | | | 104150, |
| | | | | | | | | | 104500, |
| | | | | | | | | | 139200, |
| | | | | | | | | | 164920, |
| | | | | | | | | | 164920, |
| | | | | | | | | | 164920, |
| | | | | | | | | | 164920, |
| | | | | | | | | | 164920, |
| | | | | | | | | | 170650, |
| | | | | | | | | | 173490, |
| | | | | | | | | | 173490, |
| | | | | | | | | | 191306, |
| | | | | | | | | | 600900, |
| | | | | | | | | | 604332 |
| 47 | HABDM96 | 1337770 | 57 | 3-335 | 239 | Asp-32 to Ser-39. | L2570: 23, L3388: 12, | 13q32.3 | 601837, |
| | | | | | | | S0440: 12, L0666: 8, S0422: | | 606258 |
| | | | | | | | 7, L0665: 7, L2513: 6, | | |
| | | | | | | | L0662: 6, H0521: 6, L0439: | | |
| | | | | | | | 6, L0754: 6, L0756: 6, | | |
| | | | | | | | H0051: 5, L3832: 5, H0657: | | |
| | | | | | | | 4, S0358: 4, S0360: 4, | | |
| | | | | | | | H0013: 4, L0766: 4, L2884: | | |
| | | | | | | | 3, H0580: 3, H0771: 3, | | |
| | | | | | | | L3817: 3, H0791: 3, H0581: | | |
| | | | | | | | 3, H0150: 3, H0674: 3, | | |
| | | | | | | | L0805: 3, L0776: 3, L0664: | | |
| | | | | | | | 3, H0539: 3, S0406: 3, | | |
| | | | | | | | H0782: 2, H0583: 2, L2995: | | |
| | | | | | | | 2, L2282: 2, S0418: 2, | | |
| | | | | | | | S0420: 2, S0442: 2, S0408: | | |
| | | | | | | | 2, S0007: 2, H0747: 2, | | |
| | | | | | | | L2788: 2, L2789: 2, H0351: | | |
| | | | | | | | 2, H0441: 2, L3816: 2, | | |
| | | | | | | | H0486: 2, H0156: 2, H0098: | | |
| | | | | | | | 2, H0590: 2, H0004: 2, | | |
| | | | | | | | L0471: 2, H0328: 2, H0030: | | |
| | | | | | | | 2, H0494: 2, L3181: 2, | | |
| | | | | | | | L5152: 2, L0646: 2, L0771: | | |
| | | | | | | | 2, L0649: 2, L0774: 2, | | |
| | | | | | | | L0657: 2, L6427: 2, L5623: | | |
| | | | | | | | 2, L2260: 2, L0565: 2, | | |
| | | | | | | | L3827: 2, H0547: 2, H0648: | | |
| | | | | | | | 2, S0330: 2, S0380: 2, | | |
| | | | | | | | S0152: 2, H0522: 2, H0555: | | |
| | | | | | | | 2, H0478: 2, L0750: 2, | | |
| | | | | | | | L0777: 2, H0445: 2, S0436: | | |
| | | | | | | | 2, L0362: 2, S0192: 2, | | |
| | | | | | | | H0543: 2, L3839: 2, H0624: | | |
| | | | | | | | 1, H0170: 1, H0556: 1, | | |
| | | | | | | | L3643: 1, S0342: 1, H0294: | | |
| | | | | | | | 1, H0656: 1, S0116: 1, | | |
| | | | | | | | H0341: 1, S0212: 1, H0662: | | |
| | | | | | | | 1, H0761: 1, H0450: 1, | | |
| | | | | | | | H0638: 1, S0356: 1, S0444: | | |
| | | | | | | | 1, L3705: 1, H0742: 1, | | |
| | | | | | | | H0722: 1, H0735: 1, H0794: | | |
| | | | | | | | 1, H0749: 1, H0770: 1, | | |
| | | | | | | | H0778: 1, H0777: 1, H0772: | | |
| | | | | | | | 1, H0645: 1, H0619: 1, | | |
| | | | | | | | L2819: 1, L3485: 1, L5438: | | |
| | | | | | | | 1, H0406: 1, H0549: 1, | | |
| | | | | | | | H0431: 1, H0370: 1, H0415: | | |
| | | | | | | | 1, H0600: 1, H0586: 1, | | |
| | | | | | | | H0331: 1, H0574: 1, L1789: | | |
| | | | | | | | 1, T0060: 1, H0069: 1, | | |
| | | | | | | | H0427: 1, H0599: 1, H0147: | | |
| | | | | | | | 1, S0010: 1, H0421: 1, | | |
| | | | | | | | H0052: 1, H0263: 1, H0596: | | |
| | | | | | | | 1, L0040: 1, H0597: 1, | | |
| | | | | | | | H0569: 1, H0123: 1, H0012: | | |
| | | | | | | | 1, H0023: 1, H0510: 1, | | |
| | | | | | | | H0375: 1, S0003: 1, S0022: | | |
| | | | | | | | 1, S0214: 1, H0615: 1, | | |
| | | | | | | | H0039: 1, H0622: 1, T0006: | | |
| | | | | | | | 1, H0617: 1, H0673: 1, | | |
| | | | | | | | H0090: 1, H0487: 1, H0413: | | |
| | | | | | | | 1, H0059: 1, T0042: 1, | | |
| | | | | | | | H0334: 1, S0464: 1, H0745: | | |
| | | | | | | | 1, H0509: 1, H0641: 1, | | |
| | | | | | | | H0767: 1, H0647: 1, H0649: | | |
| | | | | | | | 1, S0002: 1, L3162: 1, | | |
| | | | | | | | H0743: 1, L0769: 1, L0638: | | |
| | | | | | | | 1, L0637: 1, L6415: 1, | | |
| | | | | | | | L0364: 1, L0650: 1, L0651: | | |
| | | | | | | | 1, L0806: 1, L0654: 1, | | |
| | | | | | | | L0655: 1, L0527: 1, L0659: | | |
| | | | | | | | 1, L0384: 1, L0809: 1, | | |
| | | | | | | | L0789: 1, L0663: 1, L3391: | | |
| | | | | | | | 1, L3634: 1, L2653: 1, | | |
| | | | | | | | L3635: 1, L2264: 1, L3819: | | |
| | | | | | | | 1, L3639: 1, L5244: 1, | | |
| | | | | | | | H0144: 1, H0780: 1, H0779: | | |
| | | | | | | | 1, L3811: 1, L3828: 1, | | |
| | | | | | | | L3829: 1, H0520: 1, H0519: | | |
| | | | | | | | 1, H0690: 1, H0659: 1, | | |
| | | | | | | | H0660: 1, S0378: 1, H0754: | | |
| | | | | | | | 1, H0753: 1, S0454: 1, | | |
| | | | | | | | H0696: 1, H0134: 1, S0404: | | |
| | | | | | | | 1, H0784: 1, H0785: 1, | | |
| | | | | | | | S0028: 1, L0748: 1, L0747: | | |
| | | | | | | | 1, L0749: 1, L0731: 1, | | |
| | | | | | | | L0758: 1, S0031: 1, L2200: | | |
| | | | | | | | 1, H0595: 1, H0707: 1, | | |
| | | | | | | | S0434: 1, L0596: 1, H0668: | | |
| | | | | | | | 1, H0667: 1, S0242: 1, | | |
| | | | | | | | H0423: 1, H0801: 1, S0424: | | |
| | | | | | | | 1, L3352: 1, L2853: 1, | | |
| | | | | | | | L3804: 1 and H0712: 1. | | |
| 48 | HPCBB59 | 1353385 | 58 | 5-385 | 240 | Gly-18 to Pro-23, | H0766: 1 | | |
| | | | | | | Glu-33 to Trp-40, | | | |
| | | | | | | Tyr-48 to Cys-58, | | | |
| | | | | | | Ser-76 to Tyr-81, | | | |
| | | | | | | Lys-109 to Asn-120. | | | |
| 49 | HERHD36 | 1322788 | 59 | 444-626 | 241 | Thr-30 to Ser-41, | H0748: 2 and L0777: 1. | 5p13.2 | 108962, |
| | | | | | | Val-53 to Lys-61. | | | 604489, |
| | | | | | | | | | 607004 |
| 50 | HIGAT21 | 1341980 | 60 | 16-567 | 242 | Val-19 to Tyr-28, | S0438: 36, L0581: 31, | 7q22.1 | 120160, |
| | | | | | | Tyr-61 to Gln-69, | L0748: 16, H0722: 14, | | 120160, |
| | | | | | | Met-80 to Arg-93, | H0510: 14, L0744: 14, | | 120160, |
| | | | | | | Tyr-107 to Gly-113, | H0696: 13, H0673: 12, | | 120160, |
| | | | | | | Glu-126 to Ser-131, | L3388: 10, H0188: 10, | | 126650, |
| | | | | | | Tyr-138 to Asp-143. | H0674: 10, H0741: 9, | | 126650 |
| | | | | | | | L0747: 9, H0014: 8, L0809: | | |
| | | | | | | | 8, S0330: 8, H0574: 7, | | |
| | | | | | | | S0380: 7, H0617: 6, S0328: | | |
| | | | | | | | 6, H0661: 5, H0730: 5, | | |
| | | | | | | | H0586: 5, L5622: 5, H0478: | | |
| | | | | | | | 5, H0393: 4, H0587: 4, | | |
| | | | | | | | L0774: 4, L0783: 4, L0743: | | |
| | | | | | | | 4, L0777: 4, H0663: 3, | | |
| | | | | | | | H0664: 3, H0662: 3, L3295: | | |
| | | | | | | | 3, H0169: 3, L0764: 3, | | |
| | | | | | | | L0806: 3, L0526: 3, L0782: | | |
| | | | | | | | 3, L0384: 3, L0529: 3, | | |
| | | | | | | | L0543: 3, L3641: 3, S0044: | | |
| | | | | | | | 3, L0758: 3, L3041: 2, | | |
| | | | | | | | S0444: 2, H0742: 2, L2817: | | |
| | | | | | | | 2, H0370: 2, H0331: 2, | | |
| | | | | | | | H0599: 2, H0015: 2, H0383: | | |
| | | | | | | | 2, H0165: 2, S0440: 2, | | |
| | | | | | | | H0509: 2, H0646: 2, L0763: | | |
| | | | | | | | 2, L0773: 2, L0541: 2, | | |
| | | | | | | | H0716: 1, H0484: 1, H0669: | | |
| | | | | | | | 1, L0988: 1, S0348: 1, | | |
| | | | | | | | S0442: 1, S0354: 1, S0360: | | |
| | | | | | | | 1, L2255: 1, S0222: 1, | | |
| | | | | | | | H0592: 1, H0642: 1, H0632: | | |
| | | | | | | | 1, L2647: 1, H0427: 1, | | |
| | | | | | | | L0021: 1, H0744: 1, H0545: | | |
| | | | | | | | 1, H0197: 1, H0199: 1, | | |
| | | | | | | | H0239: 1, H0092: 1, H0181: | | |
| | | | | | | | 1, H0032: 1, H0166: 1, | | |
| | | | | | | | S0016: 1, S0464: 1, H0773: | | |
| | | | | | | | 1, L0762: 1, L0640: 1, | | |
| | | | | | | | L0631: 1, L0772: 1, L0771: | | |
| | | | | | | | 1, L6418: 1, L0659: 1, | | |
| | | | | | | | L0540: 1, L0518: 1, L0528: | | |
| | | | | | | | 1, L5623: 1, L0788: 1, | | |
| | | | | | | | H0757: 1, H0764: 1, H0658: | | |
| | | | | | | | 1, S0378: 1, H0766: 1, | | |
| | | | | | | | S0406: 1, H0785: 1, S0392: | | |
| | | | | | | | 1, H0479: 1, S0434: 1, | | |
| | | | | | | | L0596: 1 and L0362: 1. | | |
| | HIGAT21 | 1341981 | 172 | 16-537 | 354 | Val-19 to Tyr-28, | | | |
| | | | | | | Tyr-61 to Gln-69, | | | |
| | | | | | | Met-80 to Arg-93, | | | |
| | | | | | | Tyr-107 to Gly-113, | | | |
| | | | | | | Glu-126 to Ser-131, | | | |
| | | | | | | Tyr-138 to Asp-143, | | | |
| | | | | | | Ile-163 to Trp-168. | | | |
| 51 | HIGBG18 | 1337744 | 61 | 71-724 | 243 | | S0378: 3, S0380: 3, H0764: | | |
| | | | | | | | 2, H0766: 2 and L4558: 1. | | |
| 52 | HIGBQ67 | 1344625 | 62 | 71-937 | 244 | Gly-37 to Asp-48, | S0358: 8, H0457: 6, | | |
| | | | | | | Tyr-99 to Pro-108, | L0777: 6, S0436: 6, L0748: | | |
| | | | | | | Pro-117 to Asp-123, | 5, H0156: 4, L0776: 4, | | |
| | | | | | | Pro-143 to Pro-149, | L0439: 4, H0341: 3, S0418: | | |
| | | | | | | Gly-194 to Pro-199, | 3, S0142: 3, L0758: 3, | | |
| | | | | | | Ala-243 to Ala-248, | H0685: 2, S0420: 2, S0046: | | |
| | | | | | | Phe-251 to Gly-259, | 2, H0370: 2, H0545: 2, | | |
| | | | | | | Pro-277 to Glu-282. | H0012: 2, H0617: 2, H0264: | | |
| | | | | | | | 2, H0494: 2, L0769: 2, | | |
| | | | | | | | L6418: 2, L0766: 2, L0775: | | |
| | | | | | | | 2, L0807: 2, L3820: 2, | | |
| | | | | | | | H0660: 2, H0539: 2, L0747: | | |
| | | | | | | | 2, L0731: 2, L0596: 2, | | |
| | | | | | | | H0422: 2, H0506: 2, H0265: | | |
| | | | | | | | 1, H0556: 1, H0140: 1, | | |
| | | | | | | | H0661: 1, H0662: 1, H0761: | | |
| | | | | | | | 1, H0638: 1, L1562: 1, | | |
| | | | | | | | S0356: 1, S0444: 1, S0410: | | |
| | | | | | | | 1, L2319: 1, H0729: 1, | | |
| | | | | | | | H0722: 1, H0728: 1, H0776: | | |
| | | | | | | | 1, H0393: 1, L5404: 1, | | |
| | | | | | | | S0278: 1, H0549: 1, L4845: | | |
| | | | | | | | 1, H0231: 1, L0738: 1, | | |
| | | | | | | | H0081: 1, L0471: 1, H0620: | | |
| | | | | | | | 1, S0051: 1, H0083: 1, | | |
| | | | | | | | H0594: 1, H0031: 1, H0181: | | |
| | | | | | | | 1, H0673: 1, H0135: 1, | | |
| | | | | | | | H0038: 1, H0551: 1, S0440: | | |
| | | | | | | | 1, S0150: 1, H0773: 1, | | |
| | | | | | | | S0422: 1, L0763: 1, L3905: | | |
| | | | | | | | 1, L0372: 1, L0800: 1, | | |
| | | | | | | | L0553: 1, L0773: 1, L0768: | | |
| | | | | | | | 1, L0774: 1, L0805: 1, | | |
| | | | | | | | L0655: 1, L0518: 1, L0783: | | |
| | | | | | | | 1, L0809: 1, L0519: 1, | | |
| | | | | | | | L6411: 1, L3635: 1, L2258: | | |
| | | | | | | | 1, L2260: 1, L0710: 1, | | |
| | | | | | | | L5244: 1, S0374: 1, H0764: | | |
| | | | | | | | 1, H0593: 1, H0690: 1, | | |
| | | | | | | | H0666: 1, H0766: 1, S0392: | | |
| | | | | | | | 1, L0750: 1, L0759: 1, | | |
| | | | | | | | S0434: 1 and H0543: 1. | | |
| 53 | HPNCW15 | 1337821 | 63 | 37-252 | 245 | Asp-65 to Gln-71. | S0378: 176, S0380: 90, | 6pter-p21.1 | |
| | | | | | | | H0764: 87, H0757: 15, | | |
| | | | | | | | H0762: 15, S0368: 14, | | |
| | | | | | | | L3638: 10, H0753: 10, | | |
| | | | | | | | L0778: 9, H0039: 8, H0622: | | |
| | | | | | | | 8, H0766: 7, H0270: 5, | | |
| | | | | | | | L4558: 4, H0765: 4, H0755: | | |
| | | | | | | | 3, H0029: 2, T0023: 2, | | |
| | | | | | | | H0040: 2, L0605: 2, H0624: | | |
| | | | | | | | 1, H0057: 1, H0014: 1, | | |
| | | | | | | | L4501: 1, H0754: 1 and | | |
| | | | | | | | H0752: 1. | | |
| 54 | HIGAT76 | 1337712 | 64 | 21-359 | 246 | Ala-38 to Ser-49, | S0378: 173, S0380: 88, | 6pter-p21.1 | |
| | | | | | | Asp-106 to Gln-112. | H0764: 84, H0757: 15, | | |
| | | | | | | | H0762: 15, S0368: 14, | | |
| | | | | | | | L0778: 9, L3638: 9, H0753: | | |
| | | | | | | | 8, H0039: 7, H0622: 7, | | |
| | | | | | | | H0766: 7, H0270: 5, L4558: | | |
| | | | | | | | 4, H0765: 4, H0755: 3, | | |
| | | | | | | | H0029: 2, T0023: 2, H0040: | | |
| | | | | | | | 2, L0605: 2, H0624: 1, | | |
| | | | | | | | H0057: 1, H0014: 1, L4501: | | |
| | | | | | | | 1, H0754: 1 and H0752: 1. | | |
| 55 | HPNCC51 | 1343401 | 65 | 107-649 | 247 | Glu-14 to Arg-19, | H0682: 10, H0521: 10, | 19p13.2 | 108725, |
| | | | | | | Glu-73 to Gly-80, | H0617: 8, H0423: 7, S0360: | | 120700, |
| | | | | | | Ala-104 to Glu-114, | 6, H0754: 6, H0740: 5, | | 133171, |
| | | | | | | Glu-135 to Asn-141, | H0620: 5, H0547: 5, S0406: | | 146738, |
| | | | | | | Asp-150 to Ser-161. | 5, H0657: 4, H0778: 4, | | 147670, |
| | | | | | | | H0687: 4, H0641: 4, S0422: | | 147670, |
| | | | | | | | 4, H0666: 4, H0584: 3, | | 147670, |
| | | | | | | | H0638: 3, H0618: 3, H0039: | | 147840, |
| | | | | | | | 3, H0773: 3, L0708: 3, | | 151440, |
| | | | | | | | H0435: 3, H0670: 3, S0328: | | 164953, |
| | | | | | | | 3, H0522: 3, H0445: 3, | | 177060, |
| | | | | | | | S0434: 3, H0585: 2, H0713: | | 231670, |
| | | | | | | | 2, H0717: 2, H0716: 2, | | 277600, |
| | | | | | | | T0049: 2, H0341: 2, L0946: | | 600276, |
| | | | | | | | 2, H0761: 2, S0376: 2, | | 600957, |
| | | | | | | | H0730: 2, S0476: 2, H0550: | | 601843, |
| | | | | | | | 2, H0586: 2, H0559: 2, | | 603386, |
| | | | | | | | H0486: 2, H0575: 2, H0253: | | 604781, |
| | | | | | | | 2, H0581: 2, H0622: 2, | | 605248, |
| | | | | | | | H0087: 2, H0059: 2, H0625: | | 606482, |
| | | | | | | | 2, H0509: 2, H0649: 2, | | 606945, |
| | | | | | | | L3811: 2, L3826: 2, L3204: | | 607324 |
| | | | | | | | 2, H0689: 2, H0658: 2, | | |
| | | | | | | | L0581: 2, L0361: 2, S0026: | | |
| | | | | | | | 2, H0543: 2, H0801: 2, | | |
| | | | | | | | H0800: 2, S0424: 2, L3610: | | |
| | | | | | | | 2, H0171: 1, H0556: 1, | | |
| | | | | | | | S0040: 1, H0650: 1, H0803: | | |
| | | | | | | | 1, H0255: 1, H0663: 1, | | |
| | | | | | | | H0125: 1, S0356: 1, S0442: | | |
| | | | | | | | 1, S0354: 1, S0408: 1, | | |
| | | | | | | | H0722: 1, H0771: 1, H0776: | | |
| | | | | | | | 1, H0792: 1, S0278: 1, | | |
| | | | | | | | H0587: 1, L0623: 1, H0250: | | |
| | | | | | | | 1, L0021: 1, H0599: 1, | | |
| | | | | | | | T0082: 1, S0474: 1, H0327: | | |
| | | | | | | | 1, H0530: 1, H0150: 1, | | |
| | | | | | | | L0471: 1, H0012: 1, H0023: | | |
| | | | | | | | 1, H0024: 1, H0014: 1, | | |
| | | | | | | | S0388: 1, H0071: 1, H0107: | | |
| | | | | | | | 1, H0510: 1, H0247: 1, | | |
| | | | | | | | H0271: 1, H0286: 1, H0553: | | |
| | | | | | | | 1, H0181: 1, H0606: 1, | | |
| | | | | | | | H0124: 1, H0316: 1, H0477: | | |
| | | | | | | | 1, H0100: 1, S0450: 1, | | |
| | | | | | | | S0438: 1, H0529: 1, L3904: | | |
| | | | | | | | 1, L0523: 1, L0657: 1, | | |
| | | | | | | | L0382: 1, L2262: 1, L5244: | | |
| | | | | | | | 1, L5461: 1, H0698: 1, | | |
| | | | | | | | H0781: 1, H0762: 1, H0765: | | |
| | | | | | | | 1, H0726: 1, H0519: 1, | | |
| | | | | | | | L3209: 1, H0683: 1, H0684: | | |
| | | | | | | | 1, H0660: 1, H0753: 1, | | |
| | | | | | | | S0146: 1, H0576: 1, S0027: | | |
| | | | | | | | 1, L0743: 1, L0751: 1, | | |
| | | | | | | | S0031: 1, L0599: 1, H0542: | | |
| | | | | | | | 1, S0456: 1, L4424: 1, | | |
| | | | | | | | L3633: 1 and H0352: 1. | | |
| 56 | HIGBR51 | 1337743 | 66 | 5-466 | 248 | | S0378: 3, S0380: 3, H0764: | | |
| | | | | | | | 2, H0766: 2 and L4558: 1. | | |
| 57 | HECHQ69 | 1365244 | 67 | 93-497 | 249 | Gln-17 to Phe-28, | S0330: 105, L2643: 61, | 12p13 | 103950, |
| | | | | | | Val-35 to Gly-53, | S0328: 52, L2647: 19, | | 103950, |
| | | | | | | Pro-58 to Arg-100, | L3751: 13, L2614: 10, | | 108600, |
| | | | | | | Phe-119 to Trp-134. | L2650: 10, H0770: 6, | | 110600, |
| | | | | | | | S0464: 6, H0478: 6, L2636: | | 120580, |
| | | | | | | | 2, L3509: 2, S0392: 2, | | 120580, |
| | | | | | | | S0432: 2, L2476: 1, L2627: | | 131440, |
| | | | | | | | 1, L3503: 1, L2637: 1, | | 139130, |
| | | | | | | | L2641: 1, L2644: 1, L3513: | | 154870, |
| | | | | | | | 1, L3752: 1, H0051: 1, | | 176260, |
| | | | | | | | S0352: 1, S0382: 1, S0306: | | 190450, |
| | | | | | | | 1, L0794: 1, L0803: 1, | | 200990, |
| | | | | | | | L0809: 1, L0545: 1, L0790: | | 216950, |
| | | | | | | | 1, L0779: 1, L3377: 1 and | | 600228, |
| | | | | | | | S0446: 1. | | 600618, |
| | | | | | | | | | 602096, |
| | | | | | | | | | 605232, |
| | | | | | | | | | 605257, |
| | | | | | | | | | 606257, |
| | | | | | | | | | 607060 |
| 58 | HECJN68 | 1365231 | 68 | 174-935 | 250 | Met-1 to Arg-6, | H0617: 3, L5622: 3, | | |
| | | | | | | Arg-65 to Arg-70. | S0406: 3, S0356: 1, S0358: | | |
| | | | | | | | 1, H0770: 1, H0772: 1, | | |
| | | | | | | | S0278: 1, H0586: 1, H0253: | | |
| | | | | | | | 1, H0039: 1, H0038: 1, | | |
| | | | | | | | S0440: 1, H0633: 1, H0773: | | |
| | | | | | | | 1, L0761: 1, L0764: 1, | | |
| | | | | | | | L0766: 1, L0789: 1, H0539: | | |
| | | | | | | | 1 and S0434: 1. | | |
| 59 | HEFJO40 | 1362923 | 69 | 100-1143 | 251 | Pro-24 to Cys-31, | L0754: 4, H0599: 2, | 12q13.1 | 102300, |
| | | | | | | His-39 to Glu-49, | H0770: 1, H0777: 1, H0081: | | 126337, |
| | | | | | | Gly-51 to Asp-56, | 1, S0388: 1, H0553: 1, | | 600808, |
| | | | | | | Arg-87 to Glu-96, | H0644: 1, S0038: 1, L0369: | | 601284, |
| | | | | | | Pro-108 to Pro-119, | 1, L0761: 1, L0803: 1, | | 601617, |
| | | | | | | Asn-144 to Ala-149, | L5622: 1, H0780: 1, S0328: | | 601769, |
| | | | | | | Gln-187 to Phe-196, | 1, L0777: 1, L0759: 1 and | | 601769, |
| | | | | | | Ser-209 to Gly-219, | L0366: 1. | | 602116, |
| | | | | | | Tyr-258 to Tyr-265, | | | 605423 |
| | | | | | | Thr-325 to Tyr-337. | | | |
| 60 | HEGLK47 | 1367720 | 70 | 24-1067 | 252 | Ser-3 to Gly-14, | L0581: 10, S0438: 8, | 19p13.3 | 108725, |
| | | | | | | Ser-172 to Pro-180, | H0355: 6, H0722: 3, L0664: | | 109480, |
| | | | | | | Gln-317 to Cys-329. | 3, H0521: 3, H0741: 2, | | 120700, |
| | | | | | | | H0575: 2, H0015: 2, H0510: | | 130130, |
| | | | | | | | 2, H0271: 2, H0509: 2, | | 130130, |
| | | | | | | | S0426: 2, H0717: 1, H0662: | | 133171, |
| | | | | | | | 1, S0360: 1, H0580: 1, | | 136836, |
| | | | | | | | H0742: 1, H0772: 1, H0331: | | 145981, |
| | | | | | | | 1, H0574: 1, H0632: 1, | | 147141, |
| | | | | | | | L0021: 1, H0349: 1, H0042: | | 147840, |
| | | | | | | | 1, H0179: 1, H0416: 1, | | 164953, |
| | | | | | | | H0606: 1, H0366: 1, S0448: | | 181800, |
| | | | | | | | 1, H0714: 1, H0647: 1, | | 188070, |
| | | | | | | | S0422: 1, L5125: 1, L0773: | | 277600, |
| | | | | | | | 1, L0804: 1, L5622: 1, | | 600957, |
| | | | | | | | L0791: 1, L0666: 1, L0665: | | 601238, |
| | | | | | | | 1, S0428: 1, L3666: 1, | | 601240, |
| | | | | | | | H0689: 1, H0690: 1, H0518: | | 601768, |
| | | | | | | | 1, L0751: 1 and S0434: 1. | | 601846, |
| | | | | | | | | | 602018, |
| | | | | | | | | | 602216, |
| | | | | | | | | | 602216, |
| | | | | | | | | | 602216, |
| | | | | | | | | | 602477, |
| | | | | | | | | | 605248 |
| 61 | HEDDJ18 | 1362820 | 71 | 91-603 | 253 | Asp-25 to Met-30, | L3634: 6, L0665: 3, L0657: | 12q21 | 102300, |
| | | | | | | Leu-68 to Thr-75, | 2, H0519: 2, H0771: 1, | | 159991, |
| | | | | | | Thr-129 to Lys-136, | H0778: 1, L1726: 1, H0050: | | 159991, |
| | | | | | | Gln-151 to Pro-160, | 1, L0471: 1, S0466: 1, | | 600808, |
| | | | | | | Lys-164 to Tyr-170. | H0529: 1, L6421: 1, L0768: | | 603221, |
| | | | | | | | 1, L0666: 1, H0144: 1, | | 605583 |
| | | | | | | | S0378: 1, L0747: 1, L0755: | | |
| | | | | | | | 1, L0759: 1 and S0384: 1. | | |
| 62 | HEGLA38 | 1367491 | 72 | 17-889 | 254 | Pro-18 to Gly-30, | H0251: 6, L0803: 4, | | |
| | | | | | | Arg-98 to Cys-103, | L0439: 4, S0360: 3, L0794: | | |
| | | | | | | Glu-106 to Arg-111, | 3, L0659: 3, S0206: 3, | | |
| | | | | | | Ser-117 to Gly-122, | L0749: 3, H0624: 2, H0713: | | |
| | | | | | | Glu-132 to Ala-140, | 2, H0341: 2, H0599: 2, | | |
| | | | | | | Pro-247 to Arg-252. | H0575: 2, H0050: 2, H0328: | | |
| | | | | | | | 2, H0413: 2, L0805: 2, | | |
| | | | | | | | L0776: 2, H0716: 1, H0662: | | |
| | | | | | | | 1, S0356: 1, H0733: 1, | | |
| | | | | | | | H0208: 1, L4925: 1, H0771: | | |
| | | | | | | | 1, H0772: 1, H0792: 1, | | |
| | | | | | | | H0586: 1, H0333: 1, H0486: | | |
| | | | | | | | 1, H0618: 1, H0318: 1, | | |
| | | | | | | | H0123: 1, L0471: 1, H0024: | | |
| | | | | | | | 1, T0006: 1, H0644: 1, | | |
| | | | | | | | S0210: 1, L0769: 1, L0638: | | |
| | | | | | | | 1, L7069: 1, L6421: 1, | | |
| | | | | | | | L0648: 1, L0662: 1, L0804: | | |
| | | | | | | | 1, L0375: 1, L0806: 1, | | |
| | | | | | | | L6427: 1, L0783: 1, L0809: | | |
| | | | | | | | 1, L5622: 1, L0789: 1, | | |
| | | | | | | | L0790: 1, H0689: 1, S0328: | | |
| | | | | | | | 1, H0539: 1, H0789: 1, | | |
| | | | | | | | S3014: 1, L0744: 1, L0751: | | |
| | | | | | | | 1, L0777: 1, L0780: 1, | | |
| | | | | | | | L0731: 1, H0445: 1 and | | |
| | | | | | | | L2174: 1. | | |
| 63 | HEHXT39 | 1365200 | 73 | 19-312 | 255 | Ser-35 to Thr-45. | H0770: 3, H0773: 2, | | |
| | | | | | | | H0781: 2, H0772: 1, H0592: | | |
| | | | | | | | 1, H0081: 1, H0099: 1, | | |
| | | | | | | | S0448: 1, H0767: 1, L0764: | | |
| | | | | | | | 1, L0648: 1, H0780: 1 and | | |
| | | | | | | | S0328: 1. | | |
| 64 | HMFHI61 | 1374294 | 74 | 59-1075 | 256 | Gln-32 to Cys-37, | H0778: 1 | 12q21.3-q22 | 147440, |
| | | | | | | Asn-42 to Pro-48, | | | 235800, |
| | | | | | | Ile-220 to Arg-227, | | | 273300, |
| | | | | | | Ser-262 to Lys-267, | | | 603221, |
| | | | | | | Leu-311 to Ser-317. | | | 603288, |
| | | | | | | | | | 605583, |
| | | | | | | | | | 606885 |
| 65 | HEHNH91 | 1348961 | 75 | 17-643 | 257 | Gly-76 to Leu-83, | H0494: 7, H0586: 5, | | |
| | | | | | | Ala-108 to Glu-113, | S0330: 5, H0770: 3, H0772: | | |
| | | | | | | Ala-126 to Lys-132, | 3, H0781: 3, H0602: 2, | | |
| | | | | | | Gly-145 to Leu-151, | H0587: 2, L0806: 2, L0747: | | |
| | | | | | | Gln-161 to Val-166, | 2, H0081: 1, S0250: 1, | | |
| | | | | | | Ala-180 to Gln-185, | H0708: 1, L0648: 1, L0376: | | |
| | | | | | | Gly-190 to Ala-198. | 1, L5623: 1, H0780: 1, | | |
| | | | | | | | S0328: 1, H0521: 1 and | | |
| | | | | | | | S3014: 1. | | |
| 66 | HECJZ49 | 1374268 | 76 | 76-1017 | 258 | Asp-20 to Pro-26, | L0754: 4, H0553: 3, | 12q13.1 | 102300, |
| | | | | | | Pro-28 to Glu-35, | H0599: 2, H0770: 1, H0777: | | 126337, |
| | | | | | | Pro-46 to Cys-53, | 1, H0081: 1, S0388: 1, | | 600808, |
| | | | | | | His-61 to Glu-71, | H0644: 1, S0038: 1, S0352: | | 601284, |
| | | | | | | Gly-73 to Asp-78, | 1, L0369: 1, L0761: 1, | | 601617, |
| | | | | | | Arg-109 to Glu-118, | L0803: 1, L5622: 1, H0780: | | 601769, |
| | | | | | | Pro-130 to Pro-141, | 1, S0328: 1, L0777: 1, | | 601769, |
| | | | | | | Asn-166 to Ala-171, | L0759: 1 and L0366: 1. | | 602116, |
| | | | | | | Gln-209 to Phe-218, | | | 605423 |
| | | | | | | Ser-231 to Gly-241, | | | |
| | | | | | | Tyr-280 to Tyr-287. | | | |
| 67 | HPCCR42 | 1337796 | 77 | 169-1005 | 259 | Asn-49 to Asn-57, | H0539: 2, H0792: 1, | 16q24.3 | 102600, |
| | | | | | | Pro-86 to Val-95, | H0253: 1, H0059: 1, S0440: | | 155555, |
| | | | | | | Gly-183 to Gly-191, | 1, L0773: 1, H0766: 1 and | | 155555, |
| | | | | | | Ser-244 to Pro-249. | L0602: 1. | | 253000, |
| | | | | | | | | | 600638, |
| | | | | | | | | | 600638, |
| | | | | | | | | | 602402, |
| | | | | | | | | | 602402, |
| | | | | | | | | | 602402, |
| | | | | | | | | | 602402, |
| | | | | | | | | | 602783, |
| | | | | | | | | | 605268, |
| | | | | | | | | | 607139 |
| 68 | HECHP58 | 1362970 | 78 | 48-362 | 260 | | S0330: 14, L0809: 6, | 5q35-qter | |
| | | | | | | | S0328: 5, H0770: 3, S0392: | | |
| | | | | | | | 3, L0747: 3, L0750: 3, | | |
| | | | | | | | L0768: 2, L0783: 2, H0663: | | |
| | | | | | | | 1, H0619: 1, H0050: 1, | | |
| | | | | | | | H0087: 1, H0768: 1, H0593: | | |
| | | | | | | | 1, H0670: 1, H0696: 1, | | |
| | | | | | | | S0432: 1 and T0047: 1. | | |
| 69 | HEFGF49 | 1366233 | 79 | 197-823 | 261 | Pro-44 to Thr-54, | S0422: 37, H0521: 17, | 11q22.1 | 602574, |
| | | | | | | Pro-59 to Pro-74, | S0412: 16, L0666: 15, | | 602574, |
| | | | | | | Thr-111 to Gln-127, | S0152: 13, S0360: 10, | | 602574, |
| | | | | | | Ser-156 to Thr-166. | S0436: 10, H0543: 9, | | 603113 |
| | | | | | | | L0586: 8, H0581: 8, L0766: | | |
| | | | | | | | 7, L0439: 7, H0486: 6, | | |
| | | | | | | | S0003: 6, L0657: 6, L0659: | | |
| | | | | | | | 6, H0624: 5, H0580: 5, | | |
| | | | | | | | H0013: 5, S0440: 5, S0126: | | |
| | | | | | | | 5, L0777: 5, H0423: 5, | | |
| | | | | | | | H0638: 4, S0444: 4, L3649: | | |
| | | | | | | | 4, L3655: 4, S0474: 4, | | |
| | | | | | | | H0046: 4, H0150: 4, H0591: | | |
| | | | | | | | 4, H0040: 4, H0641: 4, | | |
| | | | | | | | L0763: 4, L0770: 4, L0771: | | |
| | | | | | | | 4, L0662: 4, L0665: 4, | | |
| | | | | | | | H0547: 4, H0519: 4, H0435: | | |
| | | | | | | | 4, H0518: 4, L0754: 4, | | |
| | | | | | | | L0756: 4, S0434: 4, H0171: | | |
| | | | | | | | 3, S0212: 3, S0418: 3, | | |
| | | | | | | | S0442: 3, L3646: 3, H0393: | | |
| | | | | | | | 3, H0574: 3, H0355: 3, | | |
| | | | | | | | H0266: 3, H0553: 3, H0488: | | |
| | | | | | | | 3, H0413: 3, L0065: 3, | | |
| | | | | | | | S0438: 3, L0775: 3, L0663: | | |
| | | | | | | | 3, L0664: 3, L2260: 3, | | |
| | | | | | | | S0374: 3, H0520: 3, S0328: | | |
| | | | | | | | 3, S0406: 3, L0740: 3, | | |
| | | | | | | | L0779: 3, L0759: 3, L0608: | | |
| | | | | | | | 3, L0362: 3, S0026: 3, | | |
| | | | | | | | H0802: 3, L2844: 3, H0782: | | |
| | | | | | | | 2, H0686: 2, S0134: 2, | | |
| | | | | | | | H0657: 2, S0116: 2, S0045: | | |
| | | | | | | | 2, H0747: 2, H0749: 2, | | |
| | | | | | | | L4986: 2, S0222: 2, H0586: | | |
| | | | | | | | 2, H0497: 2, H0331: 2, | | |
| | | | | | | | H0632: 2, H0098: 2, H0575: | | |
| | | | | | | | 2, H0318: 2, H0251: 2, | | |
| | | | | | | | L0738: 2, H0628: 2, H0598: | | |
| | | | | | | | 2, H0090: 2, H0551: 2, | | |
| | | | | | | | H0623: 2, S0016: 2, H0560: | | |
| | | | | | | | 2, S0210: 2, L0772: 2, | | |
| | | | | | | | L0764: 2, L0649: 2, L0803: | | |
| | | | | | | | 2, L0629: 2, L5622: 2, | | |
| | | | | | | | L2257: 2, H0690: 2, H0659: | | |
| | | | | | | | 2, H0539: 2, S0380: 2, | | |
| | | | | | | | H0522: 2, L0750: 2, L0755: | | |
| | | | | | | | 2, L0758: 2, H0445: 2, | | |
| | | | | | | | L0596: 2, L0599: 2, S0242: | | |
| | | | | | | | 2, S0384: 2, T0002: 1, | | |
| | | | | | | | H0220: 1, H0710: 1, H0740: | | |
| | | | | | | | 1, S0040: 1, H0713: 1, | | |
| | | | | | | | L2870: 1, L4795: 1, T0049: | | |
| | | | | | | | 1, L0002: 1, H0583: 1, | | |
| | | | | | | | H0650: 1, H0803: 1, L3814: | | |
| | | | | | | | 1, L2910: 1, H0671: 1, | | |
| | | | | | | | H0661: 1, L4067: 1, L2300: | | |
| | | | | | | | 1, L4852: 1, H0305: 1, | | |
| | | | | | | | H0125: 1, S0420: 1, L0005: | | |
| | | | | | | | 1, S0358: 1, S0376: 1, | | |
| | | | | | | | S0408: 1, L3450: 1, H0329: | | |
| | | | | | | | 1, H0730: 1, H0741: 1, | | |
| | | | | | | | H0722: 1, S0468: 1, H0794: | | |
| | | | | | | | 1, H0772: 1, L2754: 1, | | |
| | | | | | | | H0792: 1, L3387: 1, L3388: | | |
| | | | | | | | 1, S6014: 1, H0441: 1, | | |
| | | | | | | | H0600: 1, H0642: 1, H0791: | | |
| | | | | | | | 1, T0040: 1, L3495: 1, | | |
| | | | | | | | L2497: 1, L2610: 1, L3750: | | |
| | | | | | | | 1, L3653: 1, H0635: 1, | | |
| | | | | | | | S0280: 1, T0070: 1, H0744: | | |
| | | | | | | | 1, H0309: 1, H0085: 1, | | |
| | | | | | | | H0263: 1, H0596: 1, H0597: | | |
| | | | | | | | 1, H0544: 1, H0439: 1, | | |
| | | | | | | | L0471: 1, S0051: 1, H0083: | | |
| | | | | | | | 1, H0594: 1, H0428: 1, | | |
| | | | | | | | H0622: 1, L0483: 1, H0674: | | |
| | | | | | | | 1, S0036: 1, H0038: 1, | | |
| | | | | | | | H0634: 1, T0067: 1, H0412: | | |
| | | | | | | | 1, H0059: 1, T0069: 1, | | |
| | | | | | | | H0561: 1, H0509: 1, H0646: | | |
| | | | | | | | 1, H0652: 1, L4496: 1, | | |
| | | | | | | | L4498: 1, S0142: 1, H0538: | | |
| | | | | | | | 1, L0598: 1, H0529: 1, | | |
| | | | | | | | L4557: 1, L0520: 1, L0638: | | |
| | | | | | | | 1, L0637: 1, L3905: 1, | | |
| | | | | | | | L0761: 1, L0667: 1, L0646: | | |
| | | | | | | | 1, L0800: 1, L6416: 1, | | |
| | | | | | | | L6419: 1, L6425: 1, L6423: | | |
| | | | | | | | 1, L6421: 1, L0648: 1, | | |
| | | | | | | | L0521: 1, L6415: 1, L0364: | | |
| | | | | | | | 1, L0387: 1, L0381: 1, | | |
| | | | | | | | L0522: 1, L0650: 1, L0375: | | |
| | | | | | | | 1, L0806: 1, L0805: 1, | | |
| | | | | | | | L0653: 1, L0655: 1, L0807: | | |
| | | | | | | | 1, L0527: 1, L4669: 1, | | |
| | | | | | | | L6426: 1, L0518: 1, L0783: | | |
| | | | | | | | 1, L0809: 1, L0367: 1, | | |
| | | | | | | | L0792: 1, S0006: 1, L2657: | | |
| | | | | | | | 1, L2655: 1, L3634: 1, | | |
| | | | | | | | L2652: 1, L2653: 1, L3635: | | |
| | | | | | | | 1, L2263: 1, L2258: 1, | | |
| | | | | | | | L2259: 1, L3638: 1, L3639: | | |
| | | | | | | | 1, L5461: 1, H0144: 1, | | |
| | | | | | | | H0697: 1, H0726: 1, H0783: | | |
| | | | | | | | 1, H0683: 1, H0658: 1, | | |
| | | | | | | | H0670: 1, H0660: 1, H0672: | | |
| | | | | | | | 1, S0330: 1, H0753: 1, | | |
| | | | | | | | H0756: 1, H0525: 1, H0696: | | |
| | | | | | | | 1, H0555: 1, H0784: 1, | | |
| | | | | | | | H0789: 1, H0436: 1, S0392: | | |
| | | | | | | | 1, H0478: 1, L0780: 1, | | |
| | | | | | | | L0752: 1, L0731: 1, S0260: | | |
| | | | | | | | 1, L0588: 1, L0591: 1, | | |
| | | | | | | | H0667: 1, S0196: 1, H0422: | | |
| | | | | | | | 1, H0801: 1, H0800: 1, | | |
| | | | | | | | L0697: 1, S0424: 1, S0452: | | |
| | | | | | | | 1 and S0460: 1. | | |
| 70 | HEFJI37 | 1365175 | 80 | 189-911 | 262 | Trp-19 to Ser-31, | H0713: 6, H0717: 5, | 4p16.3-q21 | 102680, |
| | | | | | | Gln-51 to Gly-57, | H0754: 5, H0716: 4, H0772: | | 134934, |
| | | | | | | Pro-103 to Arg-111, | 4, L0758: 4, S0436: 4, | | 134934, |
| | | | | | | Gln-123 to Asn-133, | S0408: 3, H0771: 3, H0100: | | 134934, |
| | | | | | | His-139 to Phe-146, | 3, L6432: 3, L0649: 3, | | 134934, |
| | | | | | | Gly-183 to Asn-192, | S0356: 2, S0358: 2, H0645: | | 134934, |
| | | | | | | Glu-197 to Arg-203, | 2, S0336: 2, H0163: 2, | | 134934, |
| | | | | | | Glu-219 to Ser-235. | S0440: 2, L7065: 2, L0662: | | 134934, |
| | | | | | | | 2, L0774: 2, L0776: 2, | | 134934, |
| | | | | | | | L0663: 2, H0757: 2, H0724: | | 143100, |
| | | | | | | | 2, S0406: 2, L0779: 2, | | 180072, |
| | | | | | | | L0759: 2, L0599: 2, H0782: | | 180072, |
| | | | | | | | 1, S0444: 1, H0733: 1, | | 194190, |
| | | | | | | | H0770: 1, H0777: 1, H0549: | | 252800, |
| | | | | | | | 1, H0587: 1, H0575: 1, | | 252800, |
| | | | | | | | H0590: 1, H0309: 1, L4788: | | 252800, |
| | | | | | | | 1, S0314: 1, T0006: 1, | | 602104, |
| | | | | | | | H0553: 1, H0383: 1, H0551: | | 605841 |
| | | | | | | | 1, L4498: 1, L0763: 1, | | |
| | | | | | | | L0770: 1, L5565: 1, L0642: | | |
| | | | | | | | 1, L6412: 1, L6418: 1, | | |
| | | | | | | | L0651: 1, L0653: 1, L0657: | | |
| | | | | | | | 1, L0659: 1, L0809: 1, | | |
| | | | | | | | L5622: 1, L0791: 1, H0725: | | |
| | | | | | | | 1, H0683: 1, H0672: 1, | | |
| | | | | | | | S0380: 1, H0555: 1 and | | |
| | | | | | | | L0757: 1. | | |
| 71 | HEDCP16 | 1365248 | 81 | 42-401 | 263 | Gly-31 to Lys-53, | H0771: 2 | | |
| | | | | | | Pro-71 to Cys-77, | | | |
| | | | | | | His-79 to Cys-103. | | | |
| 72 | HECJR25 | 1365243 | 82 | 350-754 | 264 | Gln-17 to Phe-28, | S0330: 105, L2643: 61, | 12p13 | 103950, |
| | | | | | | Val-35 to Gly-53, | S0328: 52, L2647: 19, | | 103950, |
| | | | | | | Pro-58 to Arg-100, | L3751: 13, L2614: 10, | | 108600, |
| | | | | | | Phe-119 to Trp-134. | L2650: 10, H0770: 6, | | 110600, |
| | | | | | | | S0464: 6, H0478: 6, L2636: | | 120580, |
| | | | | | | | 2, L3509: 2, S0392: 2, | | 120580, |
| | | | | | | | S0432: 2, L2476: 1, L2627: | | 131440, |
| | | | | | | | 1, L3503: 1, L2637: 1, | | 139130, |
| | | | | | | | L2641: 1, L2644: 1, L3513: | | 154870, |
| | | | | | | | 1, L3752: 1, H0051: 1, | | 176260, |
| | | | | | | | S0352: 1, S0382: 1, S0306: | | 190450, |
| | | | | | | | 1, L0794: 1, L0803: 1, | | 200990, |
| | | | | | | | L0809: 1, L0545: 1, L0790: | | 216950, |
| | | | | | | | 1, L0779: 1, L3377: 1 and | | 600228, |
| | | | | | | | S0446: 1. | | 600618, |
| | | | | | | | | | 602096, |
| | | | | | | | | | 605232, |
| | | | | | | | | | 605257, |
| | | | | | | | | | 606257, |
| | | | | | | | | | 607060 |
| 73 | HEEMT12 | 1374274 | 83 | 33-326 | 265 | Ser-35 to Thr-45. | H0770: 3, H0773: 2, | | |
| | | | | | | | H0781: 2, H0772: 1, H0592: | | |
| | | | | | | | 1, H0081: 1, H0099: 1, | | |
| | | | | | | | S0448: 1, H0767: 1, L0764: | | |
| | | | | | | | 1, L0648: 1, H0780: 1 and | | |
| | | | | | | | S0328: 1. | | |
| 74 | HECHX69 | 1350954 | 84 | 188-748 | 266 | Gln-25 to Gly-32. | H0494: 4, S0352: 3, | | |
| | | | | | | | L5623: 3, H0600: 2, H0587: | | |
| | | | | | | | 2, H0781: 2, H0483: 1, | | |
| | | | | | | | S0476: 1, H0770: 1, H0777: | | |
| | | | | | | | 1, H0592: 1, H0586: 1, | | |
| | | | | | | | T0067: 1, H0379: 1, L4813: | | |
| | | | | | | | 1, L6425: 1, L5622: 1 and | | |
| | | | | | | | H0555: 1. | | |
| 75 | HEGLP63 | 1374286 | 85 | 17-310 | 267 | Ser-35 to Thr-45. | H0770: 3, H0773: 2, | | |
| | | | | | | | H0781: 2, H0772: 1, H0592: | | |
| | | | | | | | 1, H0081: 1, H0099: 1, | | |
| | | | | | | | S0448: 1, H0767: 1, L0764: | | |
| | | | | | | | 1, L0648: 1, H0780: 1 and | | |
| | | | | | | | S0328: 1. | | |
| 76 | HEFIA60 | 1362932 | 86 | 279-512 | 268 | | H0776: 1 | | |
| 77 | HEFID84 | 1365275 | 87 | 143-685 | 269 | Glu-14 to Arg-19, | H0682: 10, H0521: 10, | 19p13.2 | 108725, |
| | | | | | | Glu-73 to Gly-80, | H0617: 8, H0423: 7, S0360: | | 120700, |
| | | | | | | Ala-104 to Glu-114, | 6, H0754: 6, H0740: 5, | | 133171, |
| | | | | | | Glu-135 to Asn-141, | H0620: 5, H0547: 5, S0406: | | 146738, |
| | | | | | | Asp-150 to Ser-161. | 5, H0657: 4, H0778: 4, | | 147670, |
| | | | | | | | H0687: 4, H0641: 4, S0422: | | 147670, |
| | | | | | | | 4, H0666: 4, H0584: 3, | | 147670, |
| | | | | | | | H0638: 3, H0618: 3, H0039: | | 147840, |
| | | | | | | | 3, H0773: 3, L0708: 3, | | 151440, |
| | | | | | | | H0435: 3, H0670: 3, S0328: | | 164953, |
| | | | | | | | 3, H0522: 3, H0445: 3, | | 177060, |
| | | | | | | | S0434: 3, H0585: 2, H0713: | | 231670, |
| | | | | | | | 2, H0717: 2, H0716: 2, | | 277600, |
| | | | | | | | T0049: 2, H0341: 2, L0946: | | 600276, |
| | | | | | | | 2, H0761: 2, S0376: 2, | | 600957, |
| | | | | | | | H0730: 2, S0476: 2, H0550: | | 601843, |
| | | | | | | | 2, H0586: 2, H0559: 2, | | 603386, |
| | | | | | | | H0486: 2, H0575: 2, H0253: | | 604781, |
| | | | | | | | 2, H0581: 2, H0622: 2, | | 605248, |
| | | | | | | | H0087: 2, H0059: 2, H0625: | | 606482, |
| | | | | | | | 2, H0509: 2, H0649: 2, | | 606945, |
| | | | | | | | L3811: 2, L3826: 2, L3204: | | 607324 |
| | | | | | | | 2, H0689: 2, H0658: 2, | | |
| | | | | | | | L0581: 2, L0361: 2, S0026: | | |
| | | | | | | | 2, H0543: 2, H0801: 2, | | |
| | | | | | | | H0800: 2, S0424: 2, L3610: | | |
| | | | | | | | 2, H0171: 1, H0556: 1, | | |
| | | | | | | | S0040: 1, H0650: 1, H0803: | | |
| | | | | | | | 1, H0255: 1, H0663: 1, | | |
| | | | | | | | H0125: 1, S0356: 1, S0442: | | |
| | | | | | | | 1, S0354: 1, S0408: 1, | | |
| | | | | | | | H0722: 1, H0771: 1, H0776: | | |
| | | | | | | | 1, H0792: 1, S0278: 1, | | |
| | | | | | | | H0587: 1, L0623: 1, H0250: | | |
| | | | | | | | 1, L0021: 1, H0599: 1, | | |
| | | | | | | | T0082: 1, S0474: 1, H0327: | | |
| | | | | | | | 1, H0530: 1, H0150: 1, | | |
| | | | | | | | L0471: 1, H0012: 1, H0023: | | |
| | | | | | | | 1, H0024: 1, H0014: 1, | | |
| | | | | | | | S0388: 1, H0071: 1, H0107: | | |
| | | | | | | | 1, H0510: 1, H0247: 1, | | |
| | | | | | | | H0271: 1, H0286: 1, H0553: | | |
| | | | | | | | 1, H0181: 1, H0606: 1, | | |
| | | | | | | | H0124: 1, H0316: 1, H0477: | | |
| | | | | | | | 1, H0100: 1, S0450: 1, | | |
| | | | | | | | S0438: 1, H0529: 1, L3904: | | |
| | | | | | | | 1, L0523: 1, L0657: 1, | | |
| | | | | | | | L0382: 1, L2262: 1, L5244: | | |
| | | | | | | | 1, L5461: 1, H0698: 1, | | |
| | | | | | | | H0781: 1, H0762: 1, H0765: | | |
| | | | | | | | 1, H0726: 1, H0519: 1, | | |
| | | | | | | | L3209: 1, H0683: 1, H0684: | | |
| | | | | | | | 1, H0660: 1, H0753: 1, | | |
| | | | | | | | S0146: 1, H0576: 1, S0027: | | |
| | | | | | | | 1, L0743: 1, L0751: 1, | | |
| | | | | | | | S0031: 1, L0599: 1, H0542: | | |
| | | | | | | | 1, S0456: 1, L4424: 1, | | |
| | | | | | | | L3633: 1 and H0352: 1. | | |
| 78 | HEHXR32 | 1349325 | 88 | 1018-1809 | 270 | Arg-67 to Arg-76. | H0693: 33, H0559: 8, | 4p16.3 | 102680, |
| | | | | | | | L0439: 6, L0666: 5, L0751: | | 134934, |
| | | | | | | | 5, H0637: 4, H0617: 4, | | 134934, |
| | | | | | | | H0265: 3, H0224: 3, H0622: | | 134934, |
| | | | | | | | 3, H0040: 3, H0494: 3, | | 134934, |
| | | | | | | | L0766: 3, H0521: 3, L0750: | | 134934, |
| | | | | | | | 3, H0583: 2, S0045: 2, | | 134934, |
| | | | | | | | H0550: 2, H0586: 2, S6028: | | 134934, |
| | | | | | | | 2, H0059: 2, L4496: 2, | | 134934, |
| | | | | | | | L0653: 2, L0791: 2, L0663: | | 143100, |
| | | | | | | | 2, L0665: 2, S0052: 2, | | 180072, |
| | | | | | | | H0593: 2, H0659: 2, H0539: | | 180072, |
| | | | | | | | 2, L0744: 2, L0747: 2, | | 194190, |
| | | | | | | | H0445: 2, S0436: 2, H0422: | | 252800, |
| | | | | | | | 2, H0677: 2, H0721: 1, | | 252800, |
| | | | | | | | H0739: 1, L0411: 1, H0624: | | 252800, |
| | | | | | | | 1, H0686: 1, H0294: 1, | | 602104, |
| | | | | | | | S0134: 1, H0656: 1, L4900: | | 605841 |
| | | | | | | | 1, H0483: 1, H0255: 1, | | |
| | | | | | | | S0442: 1, S0408: 1, H0728: | | |
| | | | | | | | 1, H0747: 1, L0717: 1, | | |
| | | | | | | | H0441: 1, H0370: 1, H0592: | | |
| | | | | | | | 1, H0333: 1, H0492: 1, | | |
| | | | | | | | H0427: 1, S0280: 1, H0618: | | |
| | | | | | | | 1, S0182: 1, H0545: 1, | | |
| | | | | | | | H0009: 1, H0012: 1, H0024: | | |
| | | | | | | | 1, H0687: 1, H0292: 1, | | |
| | | | | | | | H0604: 1, H0163: 1, H0634: | | |
| | | | | | | | 1, H0087: 1, H0551: 1, | | |
| | | | | | | | H0413: 1, L0351: 1, H0560: | | |
| | | | | | | | 1, S0344: 1, S0002: 1, | | |
| | | | | | | | L0640: 1, L0763: 1, L0769: | | |
| | | | | | | | 1, L0637: 1, L5575: 1, | | |
| | | | | | | | L5565: 1, L3905: 1, L0667: | | |
| | | | | | | | 1, L0643: 1, L0374: 1, | | |
| | | | | | | | L0764: 1, L0771: 1, L0773: | | |
| | | | | | | | 1, L0648: 1, L0662: 1, | | |
| | | | | | | | L0767: 1, L0649: 1, L0774: | | |
| | | | | | | | 1, L0775: 1, L0776: 1, | | |
| | | | | | | | L0655: 1, L0657: 1, L0659: | | |
| | | | | | | | 1, L6426: 1, L0809: 1, | | |
| | | | | | | | L0793: 1, L2258: 1, L2261: | | |
| | | | | | | | 1, L2654: 1, H0781: 1, | | |
| | | | | | | | H0783: 1, H0547: 1, H0519: | | |
| | | | | | | | 1, S0126: 1, H0689: 1, | | |
| | | | | | | | H0658: 1, H0696: 1, H0436: | | |
| | | | | | | | 1, L0780: 1, L0731: 1, | | |
| | | | | | | | L0758: 1, L0605: 1, H0543: | | |
| | | | | | | | 1, H0423: 1, S0424: 1 and | | |
| | | | | | | | H0352: 1. | | |
| 79 | HMFHW53 | 1365703 | 89 | 107-556 | 271 | Glu-62 to Ser-69, | L0439: 4, L0754: 4, L4860: | | |
| | | | | | | Pro-99 to Thr-104. | 2, S0007: 2, S0003: 2, | | |
| | | | | | | | L0521: 2, L0766: 2, H0658: | | |
| | | | | | | | 2, H0543: 2, L0005: 1, | | |
| | | | | | | | S0376: 1, S0408: 1, H0778: | | |
| | | | | | | | 1, S0222: 1, H0004: 1, | | |
| | | | | | | | H0263: 1, T0103: 1, H0545: | | |
| | | | | | | | 1, H0510: 1, H0553: 1, | | |
| | | | | | | | L0055: 1, H0090: 1, H0038: | | |
| | | | | | | | 1, H0560: 1, H0131: 1, | | |
| | | | | | | | S0422: 1, L0637: 1, L6416: | | |
| | | | | | | | 1, L0803: 1, L0775: 1, | | |
| | | | | | | | L0375: 1, L0776: 1, L0657: | | |
| | | | | | | | 1, L0659: 1, L0665: 1, | | |
| | | | | | | | L2657: 1, L3634: 1, L2262: | | |
| | | | | | | | 1, H0547: 1, H0519: 1, | | |
| | | | | | | | H0659: 1, H0521: 1, H0696: | | |
| | | | | | | | 1, S0390: 1, L0777: 1, | | |
| | | | | | | | L0780: 1, L0757: 1, S0242: | | |
| | | | | | | | 1 and H0542: 1. | | |
| 80 | HEDCZ72 | 1362945 | 90 | 255-587 | 272 | Thr-75 to Gly-90, | L0601: 4, H0341: 1, | | |
| | | | | | | Pro-97 to Arg-110. | H0580: 1, H0771: 1, H0772: | | |
| | | | | | | | 1, H0069: 1, H0581: 1, | | |
| | | | | | | | L0471: 1, H0057: 1, H0252: | | |
| | | | | | | | 1, H0090: 1, T0041: 1, | | |
| | | | | | | | L0761: 1, L0800: 1, L0766: | | |
| | | | | | | | 1, L0649: 1, L0803: 1, | | |
| | | | | | | | L0790: 1, L0663: 1, L2258: | | |
| | | | | | | | 1, L2264: 1, H0783: 1, | | |
| | | | | | | | S0330: 1, S3014: 1 and | | |
| | | | | | | | L0599: 1. | | |
| 81 | HECKQ42 | 1374269 | 91 | 22-315 | 273 | Ser-35 to Thr-45. | H0770: 3, H0773: 2, | | |
| | | | | | | | H0781: 2, H0772: 1, H0592: | | |
| | | | | | | | 1, H0081: 1, H0099: 1, | | |
| | | | | | | | S0448: 1, H0767: 1, L0764: | | |
| | | | | | | | 1, L0648: 1, H0780: 1 and | | |
| | | | | | | | S0328: 1. | | |
| 82 | HEHXJ43 | 1374289 | 92 | 20-529 | 274 | Gly-76 to Leu-83, | H0494: 7, H0586: 5, | | |
| | | | | | | Ala-108 to Glu-113, | S0330: 5, H0770: 3, H0772: | | |
| | | | | | | Gln-125 to Gly-138. | 3, H0781: 3, H0602: 2, | | |
| | | | | | | | H0587: 2, L0806: 2, L0747: | | |
| | | | | | | | 2, H0081: 1, S0250: 1, | | |
| | | | | | | | H0708: 1, L0648: 1, L0376: | | |
| | | | | | | | 1, L5623: 1, H0780: 1, | | |
| | | | | | | | S0328: 1, H0521: 1 and | | |
| | | | | | | | S3014: 1. | | |
| 83 | HECKS63 | 1374270 | 93 | 74-643 | 275 | Lys-27 to Glu-35, | L0744: 35, H0733: 15, | 3q26.2-qter | |
| | | | | | | Arg-151 to Pro-156. | T0006: 15, S0031: 15, | | |
| | | | | | | | H0772: 12, S0222: 12, | | |
| | | | | | | | L0742: 12, H0427: 8, | | |
| | | | | | | | S0282: 7, L5401: 7, S0366: | | |
| | | | | | | | 7, H0713: 6, H0771: 6, | | |
| | | | | | | | S0010: 6, S0051: 6, L0743: | | |
| | | | | | | | 6, L0754: 6, S0260: 6, | | |
| | | | | | | | H0739: 5, H0716: 5, H0728: | | |
| | | | | | | | 5, H0051: 5, S0036: 5, | | |
| | | | | | | | L0604: 5, H0782: 4, T0060: | | |
| | | | | | | | 4, S0334: 4, S0364: 4, | | |
| | | | | | | | H0063: 4, L0655: 4, S0330: | | |
| | | | | | | | 4, L0747: 4, L4884: 3, | | |
| | | | | | | | H0662: 3, H0729: 3, H0586: | | |
| | | | | | | | 3, H0052: 3, H0327: 3, | | |
| | | | | | | | L4788: 3, H0188: 3, S0318: | | |
| | | | | | | | 3, S0336: 3, S0316: 3, | | |
| | | | | | | | S0312: 3, H0031: 3, H0644: | | |
| | | | | | | | 3, H0090: 3, S0038: 3, | | |
| | | | | | | | L0662: 3, H0766: 3, L0749: | | |
| | | | | | | | 3, L0758: 3, L0589: 3, | | |
| | | | | | | | H0669: 2, S0358: 2, S0360: | | |
| | | | | | | | 2, H0734: 2, H0770: 2, | | |
| | | | | | | | S6016: 2, H0441: 2, H0370: | | |
| | | | | | | | 2, L0623: 2, H0599: 2, | | |
| | | | | | | | H0618: 2, S0346: 2, S0049: | | |
| | | | | | | | 2, H0373: 2, S0340: 2, | | |
| | | | | | | | S0314: 2, H0328: 2, H0708: | | |
| | | | | | | | 2, S0464: 2, L0665: 2, | | |
| | | | | | | | H0780: 2, L5273: 2, H0658: | | |
| | | | | | | | 2, H0672: 2, S0044: 2, | | |
| | | | | | | | L0439: 2, L0753: 2, L0731: | | |
| | | | | | | | 2, S0434: 2, L0600: 2, | | |
| | | | | | | | S6024: 1, S0116: 1, S0110: | | |
| | | | | | | | 1, S0030: 1, H0664: 1, | | |
| | | | | | | | L4868: 1, S0442: 1, S0444: | | |
| | | | | | | | 1, L3645: 1, H0735: 1, | | |
| | | | | | | | S0300: 1, H0462: 1, H0431: | | |
| | | | | | | | 1, L3503: 1, L3655: 1, | | |
| | | | | | | | S0280: 1, L0021: 1, T0082: | | |
| | | | | | | | 1, H0421: 1, H0363: 1, | | |
| | | | | | | | H0310: 1, H0194: 1, H0044: | | |
| | | | | | | | 1, H0081: 1, S0388: 1, | | |
| | | | | | | | H0399: 1, H0594: 1, S6028: | | |
| | | | | | | | 1, H0110: 1, H0622: 1, | | |
| | | | | | | | H0553: 1, L0142: 1, H0087: | | |
| | | | | | | | 1, T0069: 1, T0004: 1, | | |
| | | | | | | | S0112: 1, L0435: 1, L0769: | | |
| | | | | | | | 1, L3904: 1, L3905: 1, | | |
| | | | | | | | L0772: 1, L0773: 1, L0784: | | |
| | | | | | | | 1, L0659: 1, L0526: 1, | | |
| | | | | | | | L0783: 1, L0530: 1, L4779: | | |
| | | | | | | | 1, L3639: 1, L3641: 1, | | |
| | | | | | | | H0144: 1, L4347: 1, L4350: | | |
| | | | | | | | 1, H0725: 1, H0723: 1, | | |
| | | | | | | | H0757: 1, H0724: 1, H0783: | | |
| | | | | | | | 1, L3811: 1, H0752: 1, | | |
| | | | | | | | H0521: 1, S3012: 1, S0390: | | |
| | | | | | | | 1, S0027: 1, L0741: 1, | | |
| | | | | | | | L0748: 1, L0777: 1, L0755: | | |
| | | | | | | | 1, L0759: 1, S0436: 1, | | |
| | | | | | | | L0485: 1, S0106: 1, S0192: | | |
| | | | | | | | 1 and L2847: 1. | | |
| 84 | HEDEQ16 | 1374273 | 94 | 21-563 | 276 | Glu-14 to Arg-19, | H0682: 10, H0521: 10, | 19p13.2 | 108725, |
| | | | | | | Glu-73 to Gly-80, | H0617: 8, H0423: 7, S0360: | | 120700, |
| | | | | | | Ala-104 to Glu-114, | 6, H0754: 6, H0740: 5, | | 133171, |
| | | | | | | Glu-135 to Asn-141, | H0620: 5, H0547: 5, S0406: | | 146738, |
| | | | | | | Asp-150 to Ser-161. | 5, H0657: 4, H0778: 4, | | 147670, |
| | | | | | | | H0687: 4, H0641: 4, S0422: | | 147670, |
| | | | | | | | 4, H0666: 4, H0584: 3, | | 147670, |
| | | | | | | | H0638: 3, H0618: 3, H0039: | | 147840, |
| | | | | | | | 3, H0773: 3, L0708: 3, | | 151440, |
| | | | | | | | H0435: 3, H0670: 3, S0328: | | 164953, |
| | | | | | | | 3, H0522: 3, H0445: 3, | | 177060, |
| | | | | | | | S0434: 3, H0585: 2, H0713: | | 231670, |
| | | | | | | | 2, H0717: 2, H0716: 2, | | 277600, |
| | | | | | | | T0049: 2, H0341: 2, L0946: | | 600276, |
| | | | | | | | 2, H0761: 2, S0376: 2, | | 600957, |
| | | | | | | | H0730: 2, S0476: 2, H0550: | | 601843, |
| | | | | | | | 2, H0586: 2, H0559: 2, | | 603386, |
| | | | | | | | H0486: 2, H0575: 2, H0253: | | 604781, |
| | | | | | | | 2, H0581: 2, H0622: 2, | | 605248, |
| | | | | | | | H0087: 2, H0059: 2, H0625: | | 606482, |
| | | | | | | | 2, H0509: 2, H0649: 2, | | 606945, |
| | | | | | | | L3811: 2, L3826: 2, L3204: | | 607324 |
| | | | | | | | 2, H0689: 2, H0658: 2, | | |
| | | | | | | | L0581: 2, L0361: 2, S0026: | | |
| | | | | | | | 2, H0543: 2, H0801: 2, | | |
| | | | | | | | H0800: 2, S0424: 2, L3610: | | |
| | | | | | | | 2, H0171: 1, H0556: 1, | | |
| | | | | | | | S0040: 1, H0650: 1, H0803: | | |
| | | | | | | | 1, H0255: 1, H0663: 1, | | |
| | | | | | | | H0125: 1, S0356: 1, S0442: | | |
| | | | | | | | 1, S0354: 1, S0408: 1, | | |
| | | | | | | | H0722: 1, H0771: 1, H0776: | | |
| | | | | | | | 1, H0792: 1, S0278: 1, | | |
| | | | | | | | H0587: 1, L0623: 1, H0250: | | |
| | | | | | | | 1, L0021: 1, H0599: 1, | | |
| | | | | | | | T0082: 1, S0474: 1, H0327: | | |
| | | | | | | | 1, H0530: 1, H0150: 1, | | |
| | | | | | | | L0471: 1, H0012: 1, H0023: | | |
| | | | | | | | 1, H0024: 1, H0014: 1, | | |
| | | | | | | | S0388: 1, H0071: 1, H0107: | | |
| | | | | | | | 1, H0510: 1, H0247: 1, | | |
| | | | | | | | H0271: 1, H0286: 1, H0553: | | |
| | | | | | | | 1, H0181: 1, H0606: 1, | | |
| | | | | | | | H0124: 1, H0316: 1, H0477: | | |
| | | | | | | | 1, H0100: 1, S0450: 1, | | |
| | | | | | | | S0438: 1, H0529: 1, L3904: | | |
| | | | | | | | 1, L0523: 1, L0657: 1, | | |
| | | | | | | | L0382: 1, L2262: 1, L5244: | | |
| | | | | | | | 1, L5461: 1, H0698: 1, | | |
| | | | | | | | H0781: 1, H0762: 1, H0765: | | |
| | | | | | | | 1, H0726: 1, H0519: 1, | | |
| | | | | | | | L3209: 1, H0683: 1, H0684: | | |
| | | | | | | | 1, H0660: 1, H0753: 1, | | |
| | | | | | | | S0146: 1, H0576: 1, S0027: | | |
| | | | | | | | 1, L0743: 1, L0751: 1, | | |
| | | | | | | | S0031: 1, L0599: 1, H0542: | | |
| | | | | | | | 1, S0456: 1, L4424: 1, | | |
| | | | | | | | L3633: 1 and H0352: 1. | | |
| 85 | HEENI83 | 1374276 | 95 | 51-593 | 277 | Glu-14 to Arg-19, | H0682: 10, H0521: 10, | 19p13.2 | 108725, |
| | | | | | | Glu-73 to Gly-80, | H0617: 8, H0423: 7, S0360: | | 120700, |
| | | | | | | Ala-104 to Glu-114, | 6, H0754: 6, H0740: 5, | | 133171, |
| | | | | | | Glu-135 to Asn-141, | H0620: 5, H0547: 5, S0406: | | 146738, |
| | | | | | | Asp-150 to Ser-161. | 5, H0657: 4, H0778: 4, | | 147670, |
| | | | | | | | H0687: 4, H0641: 4, S0422: | | 147670, |
| | | | | | | | 4, H0666: 4, H0584: 3, | | 147670, |
| | | | | | | | H0638: 3, H0618: 3, H0039: | | 147840, |
| | | | | | | | 3, H0773: 3, L0708: 3, | | 151440, |
| | | | | | | | H0435: 3, H0670: 3, S0328: | | 164953, |
| | | | | | | | 3, H0522: 3, H0445: 3, | | 177060, |
| | | | | | | | S0434: 3, H0585: 2, H0713: | | 231670, |
| | | | | | | | 2, H0717: 2, H0716: 2, | | 277600, |
| | | | | | | | T0049: 2, H0341: 2, L0946: | | 600276, |
| | | | | | | | 2, H0761: 2, S0376: 2, | | 600957, |
| | | | | | | | H0730: 2, S0476: 2, H0550: | | 601843, |
| | | | | | | | 2, H0586: 2, H0559: 2, | | 603386, |
| | | | | | | | H0486: 2, H0575: 2, H0253: | | 604781, |
| | | | | | | | 2, H0581: 2, H0622: 2, | | 605248, |
| | | | | | | | H0087: 2, H0059: 2, H0625: | | 606482, |
| | | | | | | | 2, H0509: 2, H0649: 2, | | 606945, |
| | | | | | | | L3811: 2, L3826: 2, L3204: | | 607324 |
| | | | | | | | 2, H0689: 2, H0658: 2, | | |
| | | | | | | | L0581: 2, L0361: 2, S0026: | | |
| | | | | | | | 2, H0543: 2, H0801: 2, | | |
| | | | | | | | H0800: 2, S0424: 2, L3610: | | |
| | | | | | | | 2, H0171: 1, H0556: 1, | | |
| | | | | | | | S0040: 1, H0650: 1, H0803: | | |
| | | | | | | | 1, H0255: 1, H0663: 1, | | |
| | | | | | | | H0125: 1, S0356: 1, S0442: | | |
| | | | | | | | 1, S0354: 1, S0408: 1, | | |
| | | | | | | | H0722: 1, H0771: 1, H0776: | | |
| | | | | | | | 1, H0792: 1, S0278: 1, | | |
| | | | | | | | H0587: 1, L0623: 1, H0250: | | |
| | | | | | | | 1, L0021: 1, H0599: 1, | | |
| | | | | | | | T0082: 1, S0474: 1, H0327: | | |
| | | | | | | | 1, H0530: 1, H0150: 1, | | |
| | | | | | | | L0471: 1, H0012: 1, H0023: | | |
| | | | | | | | 1, H0024: 1, H0014: 1, | | |
| | | | | | | | S0388: 1, H0071: 1, H0107: | | |
| | | | | | | | 1, H0510: 1, H0247: 1, | | |
| | | | | | | | H0271: 1, H0286: 1, H0553: | | |
| | | | | | | | 1, H0181: 1, H0606: 1, | | |
| | | | | | | | H0124: 1, H0316: 1, H0477: | | |
| | | | | | | | 1, H0100: 1, S0450: 1, | | |
| | | | | | | | S0438: 1, H0529: 1, L3904: | | |
| | | | | | | | 1, L0523: 1, L0657: 1, | | |
| | | | | | | | L0382: 1, L2262: 1, L5244: | | |
| | | | | | | | 1, L5461: 1, H0698: 1, | | |
| | | | | | | | H0781: 1, H0762: 1, H0765: | | |
| | | | | | | | 1, H0726: 1, H0519: 1, | | |
| | | | | | | | L3209: 1, H0683: 1, H0684: | | |
| | | | | | | | 1, H0660: 1, H0753: 1, | | |
| | | | | | | | S0146: 1, H0576: 1, S0027: | | |
| | | | | | | | 1, L0743: 1, L0751: 1, | | |
| | | | | | | | S0031: 1, L0599: 1, H0542: | | |
| | | | | | | | 1, S0456: 1, L4424: 1, | | |
| | | | | | | | L3633: 1 and H0352: 1. | | |
| 86 | HMFHN24 | 1362928 | 96 | 250-1314 | 278 | Lys-102 to Tyr-108, | L3816: 7, S0040: 6, L0759: | 5q14.3 | 163000, |
| | | | | | | Gly-116 to Asp-121, | 5, H0013: 4, H0624: 3, | | 605472, |
| | | | | | | Glu-132 to Lys-138, | L7068: 3, L0439: 3, H0170: | | 605544 |
| | | | | | | Tyr-195 to Gly-201, | 2, H0778: 2, H0251: 2, | | |
| | | | | | | Pro-225 to Thr-231, | H0050: 2, L0769: 2, L6432: | | |
| | | | | | | Tyr-238 to Tyr-248, | 2, L0804: 2, L0593: 2, | | |
| | | | | | | Asn-256 to Phe-261, | S0342: 1, S0212: 1, H0392: | | |
| | | | | | | Pro-317 to Thr-328, | 1, H0587: 1, S0250: 1, | | |
| | | | | | | Pro-338 to Leu-344. | H0644: 1, L0564: 1, L0369: | | |
| | | | | | | | 1, L0794: 1, L0775: 1, | | |
| | | | | | | | L6427: 1, L2694: 1, L3832: | | |
| | | | | | | | 1, L0754: 1, L0779: 1, | | |
| | | | | | | | L0780: 1 and S0011: 1. | | |
| 87 | HMFHX66 | 1362809 | 97 | 2697-2984 | 279 | Gly-60 to Ser-67. | L3388: 25, L0766: 16, | | |
| | | | | | | | L0748: 11, L0756: 9, L0777: | | |
| | | | | | | | 7, L0755: 6, L0758: 6, | | |
| | | | | | | | S0360: 4, S0422: 4, L0803: | | |
| | | | | | | | 4, L0775: 4, H0436: 4, | | |
| | | | | | | | L0439: 4, L0754: 4, L0750: | | |
| | | | | | | | 4, L0780: 4, L0752: 4, | | |
| | | | | | | | S0116: 3, S0003: 3, L0771: | | |
| | | | | | | | 3, L0662: 3, L0663: 3, | | |
| | | | | | | | L3547: 3, L2708: 3, H0521: | | |
| | | | | | | | 3, L0749: 3, L0759: 3, | | |
| | | | | | | | L0592: 3, H0542: 3, H0543: | | |
| | | | | | | | 3, H0761: 2, S0358: 2, | | |
| | | | | | | | H0778: 2, H0427: 2, L0021: | | |
| | | | | | | | 2, H0575: 2, H0032: 2, | | |
| | | | | | | | L5123: 2, L0638: 2, L0659: | | |
| | | | | | | | 2, L0809: 2, L5622: 2, | | |
| | | | | | | | H0522: 2, H0555: 2, L0747: | | |
| | | | | | | | 2, L0599: 2, H0782: 1, | | |
| | | | | | | | H0624: 1, H0556: 1, L3644: | | |
| | | | | | | | 1, H0716: 1, S6024: 1, | | |
| | | | | | | | L0785: 1, H0341: 1, S0212: | | |
| | | | | | | | 1, L0005: 1, H0580: 1, | | |
| | | | | | | | H0734: 1, H0747: 1, H0771: | | |
| | | | | | | | 1, H0393: 1, H0351: 1, | | |
| | | | | | | | H0431: 1, H0486: 1, L2541: | | |
| | | | | | | | 1, H0013: 1, S0474: 1, | | |
| | | | | | | | H0052: 1, L0738: 1, H0178: | | |
| | | | | | | | 1, H0051: 1, S6028: 1, | | |
| | | | | | | | H0266: 1, H0286: 1, S0214: | | |
| | | | | | | | 1, H0628: 1, H0598: 1, | | |
| | | | | | | | S0036: 1, H0488: 1, H0646: | | |
| | | | | | | | 1, H0652: 1, L0598: 1, | | |
| | | | | | | | H0529: 1, L0369: 1, L0520: | | |
| | | | | | | | 1, L0763: 1, L0371: 1, | | |
| | | | | | | | L0769: 1, L0761: 1, L0646: | | |
| | | | | | | | 1, L0374: 1, L0649: 1, | | |
| | | | | | | | L0386: 1, L0804: 1, L0650: | | |
| | | | | | | | 1, L0774: 1, L0375: 1, | | |
| | | | | | | | L0776: 1, L0657: 1, L0515: | | |
| | | | | | | | 1, L0636: 1, L0635: 1, | | |
| | | | | | | | L0783: 1, L0529: 1, L0792: | | |
| | | | | | | | 1, L0666: 1, L0665: 1, | | |
| | | | | | | | L2652: 1, L2653: 1, L2263: | | |
| | | | | | | | 1, L2260: 1, H0144: 1, | | |
| | | | | | | | L0438: 1, L2669: 1, H0682: | | |
| | | | | | | | 1, H0684: 1, H0659: 1, | | |
| | | | | | | | H0648: 1, S0378: 1, H0518: | | |
| | | | | | | | 1, S0152: 1, S0146: 1, | | |
| | | | | | | | S0406: 1, H0789: 1, L0744: | | |
| | | | | | | | 1, L0740: 1, L0746: 1, | | |
| | | | | | | | L0779: 1, L0731: 1, S0436: | | |
| | | | | | | | 1, L0596: 1, L0366: 1, | | |
| | | | | | | | S0011: 1, S0026: 1, S0196: | | |
| | | | | | | | 1, L4441: 1, L2359: 1 and | | |
| | | | | | | | L3626: 1. | | |
| 88 | HEENV67 | 1374278 | 98 | 138-875 | 280 | Arg-25 to Gly-31, | H0521: 72, H0522: 24, | | |
| | | | | | | Pro-45 to Gly-52, | H0445: 14, L0748: 9, | | |
| | | | | | | Pro-71 to Gly-76, | H0553: 8, S0360: 6, H0575: | | |
| | | | | | | Pro-81 to Gly-91, | 6, L0754: 5, S0434: 5, | | |
| | | | | | | Glu-107 to Phe-118, | S0358: 4, L5067: 4, H0090: | | |
| | | | | | | Thr-125 to Pro-134, | 3, L0747: 3, S0436: 3, | | |
| | | | | | | Pro-147 to Gly-156, | H0638: 2, S0354: 2, S0376: | | |
| | | | | | | Gly-194 to Asn-203. | 2, S0408: 2, H0427: 2, | | |
| | | | | | | | H0309: 2, H0644: 2, S0438: | | |
| | | | | | | | 2, L0659: 2, H0658: 2, | | |
| | | | | | | | H0672: 2, H0555: 2, L0743: | | |
| | | | | | | | 2, L0755: 2, L0581: 2, | | |
| | | | | | | | H0710: 1, H0713: 1, H0583: | | |
| | | | | | | | 1, L0418: 1, L0785: 1, | | |
| | | | | | | | S0282: 1, H0661: 1, H0663: | | |
| | | | | | | | 1, L0005: 1, S0442: 1, | | |
| | | | | | | | H0777: 1, H0619: 1, L3388: | | |
| | | | | | | | 1, L4142: 1, L3496: 1, | | |
| | | | | | | | S0280: 1, H0108: 1, H0581: | | |
| | | | | | | | 1, H0597: 1, H0009: 1, | | |
| | | | | | | | H0620: 1, H0023: 1, H0014: | | |
| | | | | | | | 1, S0362: 1, H0510: 1, | | |
| | | | | | | | H0252: 1, H0039: 1, H0622: | | |
| | | | | | | | 1, H0213: 1, H0031: 1, | | |
| | | | | | | | H0189: 1, H0376: 1, H0163: | | |
| | | | | | | | 1, H0264: 1, L4824: 1, | | |
| | | | | | | | S0440: 1, H0509: 1, H0773: | | |
| | | | | | | | 1, L0769: 1, L3904: 1, | | |
| | | | | | | | L0646: 1, L0649: 1, L0378: | | |
| | | | | | | | 1, L0805: 1, L0559: 1, | | |
| | | | | | | | S0374: 1, H0726: 1, L0352: | | |
| | | | | | | | 1, H0666: 1, S0330: 1, | | |
| | | | | | | | S0378: 1, H0754: 1, S0190: | | |
| | | | | | | | 1, H0774: 1, H0345: 1, | | |
| | | | | | | | L0744: 1, L0751: 1, H0444: | | |
| | | | | | | | 1, H0343: 1, H0506: 1 and | | |
| | | | | | | | H0352: 1. | | |
| 89 | HECIB71 | 1374267 | 99 | 80-1228 | 281 | Lys-39 to Asn-48, | S0330: 108, S0328: 51, | 20q11.21 | |
| | | | | | | Arg-63 to Gly-68, | S0446: 12, L2640: 6, S0456: | | |
| | | | | | | Pro-101 to Gln-106. | 4, L3684: 3, H0770: 3, | | |
| | | | | | | | L1057: 2, S0310: 2, H0593: | | |
| | | | | | | | 2, L4890: 1, L3421: 1, | | |
| | | | | | | | L3118: 1, L5070: 1, L3503: | | |
| | | | | | | | 1, L3506: 1, L3508: 1, | | |
| | | | | | | | L2647: 1, L3511: 1, L3743: | | |
| | | | | | | | 1, L3518: 1, L3744: 1, | | |
| | | | | | | | L0022: 1, H0617: 1, S0352: | | |
| | | | | | | | 1, S0464: 1, L6417: 1, | | |
| | | | | | | | L6418: 1, L5569: 1, L0806: | | |
| | | | | | | | 1, L0791: 1 and S0436: 1. | | |
| 90 | HEHNE29 | 1374288 | 100 | 73-1056 | 282 | Arg-27 to Arg-34, | L0754: 4, H0599: 2, | 12q13.1 | 102300, |
| | | | | | | Gln-39 to Trp-46, | H0553: 2, H0770: 1, H0777: | | 126337, |
| | | | | | | Glu-60 to Pro-67, | 1, H0081: 1, S0388: 1, | | 600808, |
| | | | | | | Pro-69 to Glu-76, | H0644: 1, S0038: 1, S0352: | | 601284, |
| | | | | | | Pro-87 to Cys-94, | 1, L0369: 1, L0761: 1, | | 601617, |
| | | | | | | His-102 to Glu-112, | L0803: 1, L5622: 1, H0780: | | 601769, |
| | | | | | | Gly-114 to Asp-119, | 1, S0328: 1, L0777: 1, | | 601769, |
| | | | | | | Arg-150 to Glu-159, | L0759: 1 and L0366: 1. | | 602116, |
| | | | | | | Pro-171 to Pro-182, | | | 605423 |
| | | | | | | Asn-207 to Ala-212, | | | |
| | | | | | | Gln-250 to Phe-259, | | | |
| | | | | | | Ser-272 to Gly-282, | | | |
| | | | | | | Tyr-321 to Tyr-328. | | | |
| 91 | HEHXS16 | 1374290 | 101 | 36-635 | 283 | Glu-14 to Arg-19, | H0682: 10, H0521: 10, | 19p13.2 | 108725, |
| | | | | | | Glu-73 to Gly-80, | H0617: 8, H0423: 7, S0360: | | 120700, |
| | | | | | | Ala-104 to Glu-114, | 6, H0754: 6, H0740: 5, | | 133171, |
| | | | | | | Glu-135 to Asn-141, | H0620: 5, H0547: 5, S0406: | | 146738, |
| | | | | | | Asp-150 to Ser-161, | 5, H0657: 4, H0778: 4, | | 147670, |
| | | | | | | Arg-182 to Arg-193. | H0687: 4, H0641: 4, S0422: | | 147670, |
| | | | | | | | 4, H0666: 4, H0584: 3, | | 147670, |
| | | | | | | | H0638: 3, H0618: 3, H0039: | | 147840, |
| | | | | | | | 3, H0773: 3, L0708: 3, | | 151440, |
| | | | | | | | H0435: 3, H0670: 3, S0328: | | 164953, |
| | | | | | | | 3, H0522: 3, H0445: 3, | | 177060, |
| | | | | | | | S0434: 3, H0585: 2, H0713: | | 231670, |
| | | | | | | | 2, H0717: 2, H0716: 2, | | 277600, |
| | | | | | | | T0049: 2, H0341: 2, L0946: | | 600276, |
| | | | | | | | 2, H0761: 2, S0376: 2, | | 600957, |
| | | | | | | | H0730: 2, S0476: 2, H0550: | | 601843, |
| | | | | | | | 2, H0586: 2, H0559: 2, | | 603386, |
| | | | | | | | H0486: 2, H0575: 2, H0253: | | 604781, |
| | | | | | | | 2, H0581: 2, H0622: 2, | | 605248, |
| | | | | | | | H0087: 2, H0059: 2, H0625: | | 606482, |
| | | | | | | | 2, H0509: 2, H0649: 2, | | 606945, |
| | | | | | | | L3811: 2, L3826: 2, L3204: | | 607324 |
| | | | | | | | 2, H0689: 2, H0658: 2, | | |
| | | | | | | | L0581: 2, L0361: 2, S0026: | | |
| | | | | | | | 2, H0543: 2, H0801: 2, | | |
| | | | | | | | H0800: 2, S0424: 2, L3610: | | |
| | | | | | | | 2, H0171: 1, H0556: 1, | | |
| | | | | | | | S0040: 1, H0650: 1, H0803: | | |
| | | | | | | | 1, H0255: 1, H0663: 1, | | |
| | | | | | | | H0125: 1, S0356: 1, S0442: | | |
| | | | | | | | 1, S0354: 1, S0408: 1, | | |
| | | | | | | | H0722: 1, H0771: 1, H0776: | | |
| | | | | | | | 1, H0792: 1, S0278: 1, | | |
| | | | | | | | H0587: 1, L0623: 1, H0250: | | |
| | | | | | | | 1, L0021: 1, H0599: 1, | | |
| | | | | | | | T0082: 1, S0474: 1, H0327: | | |
| | | | | | | | 1, H0530: 1, H0150: 1, | | |
| | | | | | | | L0471: 1, H0012: 1, H0023: | | |
| | | | | | | | 1, H0024: 1, H0014: 1, | | |
| | | | | | | | S0388: 1, H0071: 1, H0107: | | |
| | | | | | | | 1, H0510: 1, H0247: 1, | | |
| | | | | | | | H0271: 1, H0286: 1, H0553: | | |
| | | | | | | | 1, H0181: 1, H0606: 1, | | |
| | | | | | | | H0124: 1, H0316: 1, H0477: | | |
| | | | | | | | 1, H0100: 1, S0450: 1, | | |
| | | | | | | | S0438: 1, H0529: 1, L3904: | | |
| | | | | | | | 1, L0523: 1, L0657: 1, | | |
| | | | | | | | L0382: 1, L2262: 1, L5244: | | |
| | | | | | | | 1, L5461: 1, H0698: 1, | | |
| | | | | | | | H0781: 1, H0762: 1, H0765: | | |
| | | | | | | | 1, H0726: 1, H0519: 1, | | |
| | | | | | | | L3209: 1, H0683: 1, H0684: | | |
| | | | | | | | 1, H0660: 1, H0753: 1, | | |
| | | | | | | | S0146: 1, H0576: 1, S0027: | | |
| | | | | | | | 1, L0743: 1, L0751: 1, | | |
| | | | | | | | S0031: 1, L0599: 1, H0542: | | |
| | | | | | | | 1, S0456: 1, L4424: 1, | | |
| | | | | | | | L3633: 1 and H0352: 1. | | |
| 92 | HEDDB56 | 1365263 | 102 | 42-401 | 284 | Gly-31 to Lys-53, | H0771: 2 | | |
| | | | | | | Pro-71 to Cys-77, | | | |
| | | | | | | His-79 to Cys-103. | | | |
| 93 | HEENK36 | 1362901 | 103 | 269-541 | 285 | Ser-37 to His-43. | L0748: 2 and H0773: 1. | | |
| 94 | HMFHT07 | 1374297 | 104 | 180-596 | 286 | Asp-60 to Ser-67. | L2570: 23, L3388: 12, | 13q32.3 | 601837, |
| | | | | | | | S0440: 12, L0666: 8, S0422: | | 606258 |
| | | | | | | | 7, L0665: 7, L2513: 6, | | |
| | | | | | | | L0662: 6, H0521: 6, L0439: | | |
| | | | | | | | 6, L0754: 6, L0756: 6, | | |
| | | | | | | | H0551: 5, L3832: 5, H0657: | | |
| | | | | | | | 4, S0358: 4, S0360: 4, | | |
| | | | | | | | H0013: 4, L0766: 4, L2884: | | |
| | | | | | | | 3, H0580: 3, H0771: 3, | | |
| | | | | | | | L3817: 3, H0791: 3, H0581: | | |
| | | | | | | | 3, H0150: 3, H0674: 3, | | |
| | | | | | | | L0805: 3, L0776: 3, L0664: | | |
| | | | | | | | 3, H0539: 3, S0406: 3, | | |
| | | | | | | | H0782: 2, H0583: 2, L2995: | | |
| | | | | | | | 2, L2282: 2, S0418: 2, | | |
| | | | | | | | S0420: 2, S0442: 2, S0408: | | |
| | | | | | | | 2, S0007: 2, H0747: 2, | | |
| | | | | | | | L2788: 2, L2789: 2, H0351: | | |
| | | | | | | | 2, H0441: 2, L3816: 2, | | |
| | | | | | | | H0486: 2, H0156: 2, H0098: | | |
| | | | | | | | 2, H0590: 2, H0004: 2, | | |
| | | | | | | | L0471: 2, H0328: 2, H0030: | | |
| | | | | | | | 2, H0494: 2, L3181: 2, | | |
| | | | | | | | L5152: 2, L0646: 2, L0771: | | |
| | | | | | | | 2, L0649: 2, L0774: 2, | | |
| | | | | | | | L0657: 2, L6427: 2, L5623: | | |
| | | | | | | | 2, L2260: 2, L0565: 2, | | |
| | | | | | | | L3827: 2, H0547: 2, H0648: | | |
| | | | | | | | 2, S0330: 2, S0380: 2, | | |
| | | | | | | | S0152: 2, H0522: 2, H0555: | | |
| | | | | | | | 2, H0478: 2, L0750: 2, | | |
| | | | | | | | L0777: 2, H0445: 2, S0436: | | |
| | | | | | | | 2, L0362: 2, S0192: 2, | | |
| | | | | | | | H0543: 2, L3839: 2, H0624: | | |
| | | | | | | | 1, H0170: 1, H0556: 1, | | |
| | | | | | | | L3643: 1, S0342: 1, H0294: | | |
| | | | | | | | 1, H0656: 1, S0116: 1, | | |
| | | | | | | | H0341: 1, S0212: 1, H0662: | | |
| | | | | | | | 1, H0761: 1, H0450: 1, | | |
| | | | | | | | H0638: 1, S0356: 1, S0444: | | |
| | | | | | | | 1, L3705: 1, H0742: 1, | | |
| | | | | | | | H0722: 1, H0735: 1, H0794: | | |
| | | | | | | | 1, H0749: 1, H0770: 1, | | |
| | | | | | | | H0778: 1, H0777: 1, H0772: | | |
| | | | | | | | 1, H0645: 1, H0619: 1, | | |
| | | | | | | | L2819: 1, L3485: 1, L5438: | | |
| | | | | | | | 1, H0406: 1, H0549: 1, | | |
| | | | | | | | H0431: 1, H0370: 1, H0415: | | |
| | | | | | | | 1, H0600: 1, H0586: 1, | | |
| | | | | | | | H0331: 1, H0574: 1, L1789: | | |
| | | | | | | | 1, T0060: 1, H0069: 1, | | |
| | | | | | | | H0427: 1, H0599: 1, H0147: | | |
| | | | | | | | 1, S0010: 1, H0421: 1, | | |
| | | | | | | | H0052: 1, H0263: 1, H0596: | | |
| | | | | | | | 1, L0040: 1, H0597: 1, | | |
| | | | | | | | H0569: 1, H0123: 1, H0012: | | |
| | | | | | | | 1, H0023: 1, H0510: 1, | | |
| | | | | | | | H0375: 1, S0003: 1, S0022: | | |
| | | | | | | | 1, S0214: 1, H0615: 1, | | |
| | | | | | | | H0039: 1, H0622: 1, T0006: | | |
| | | | | | | | 1, H0617: 1, H0673: 1, | | |
| | | | | | | | H0090: 1, H0487: 1, H0413: | | |
| | | | | | | | 1, H0059: 1, T0042: 1, | | |
| | | | | | | | H0334: 1, S0464: 1, H0745: | | |
| | | | | | | | 1, H0509: 1, H0641: 1, | | |
| | | | | | | | H0767: 1, H0647: 1, H0649: | | |
| | | | | | | | 1, S0002: 1, L3162: 1, | | |
| | | | | | | | H0743: 1, L0769: 1, L0638: | | |
| | | | | | | | 1, L0637: 1, L6415: 1, | | |
| | | | | | | | L0364: 1, L0650: 1, L0651: | | |
| | | | | | | | 1, L0806: 1, L0654: 1, | | |
| | | | | | | | L0655: 1, L0527: 1, L0659: | | |
| | | | | | | | 1, L0384: 1, L0809: 1, | | |
| | | | | | | | L0789: 1, L0663: 1, L3391: | | |
| | | | | | | | 1, L3634: 1, L2653: 1, | | |
| | | | | | | | L3635: 1, L2264: 1, L3819: | | |
| | | | | | | | 1, L3639: 1, L5244: 1, | | |
| | | | | | | | H0144: 1, H0780: 1, H0779: | | |
| | | | | | | | 1, L3811: 1, L3828: 1, | | |
| | | | | | | | L3829: 1, H0520: 1, H0519: | | |
| | | | | | | | 1, H0690: 1, H0659: 1, | | |
| | | | | | | | H0660: 1, S0378: 1, H0754: | | |
| | | | | | | | 1, H0753: 1, S0454: 1, | | |
| | | | | | | | H0696: 1, H0134: 1, S0404: | | |
| | | | | | | | 1, H0784: 1, H0785: 1, | | |
| | | | | | | | S0028: 1, L0748: 1, L0747: | | |
| | | | | | | | 1, L0749: 1, L0731: 1, | | |
| | | | | | | | L0758: 1, S0031: 1, L2200: | | |
| | | | | | | | 1, H0595: 1, H0707: 1, | | |
| | | | | | | | S0434: 1, L0596: 1, H0668: | | |
| | | | | | | | 1, H0667: 1, S0242: 1, | | |
| | | | | | | | H0423: 1, H0801: 1, S0424: | | |
| | | | | | | | 1, L3352: 1, L2853: 1, | | |
| | | | | | | | L3804: 1 and H0712: 1. | | |
| 95 | HNEMX81 | 1365284 | 105 | 37-498 | 287 | Leu-72 to Ala-97. | L0754: 12, L0803: 10, | 9q32 | 154400, |
| | | | | | | | L0740: 8, L0731: 8, S0003: | | 602290, |
| | | | | | | | 6, L0766: 6, L0649: 6, | | 603030, |
| | | | | | | | H0545: 5, H0620: 5, S0214: | | 604767, |
| | | | | | | | 5, L0777: 5, H0486: 4, | | 607084 |
| | | | | | | | L0805: 4, L2653: 4, L0748: | | |
| | | | | | | | 4, H0341: 3, S0444: 3, | | |
| | | | | | | | S0410: 3, H0012: 3, H0644: | | |
| | | | | | | | 3, H0551: 3, S0440: 3, | | |
| | | | | | | | L0771: 3, L0662: 3, L0807: | | |
| | | | | | | | 3, L0809: 3, L0663: 3, | | |
| | | | | | | | S0126: 3, S0206: 3, L0779: | | |
| | | | | | | | 3, L0757: 3, L0758: 3, | | |
| | | | | | | | L0759: 3, S0026: 3, H0294: | | |
| | | | | | | | 2, S0212: 2, S0376: 2, | | |
| | | | | | | | S0360: 2, L1441: 2, H0580: | | |
| | | | | | | | 2, H0771: 2, H0632: 2, | | |
| | | | | | | | S0280: 2, H0156: 2, L0105: | | |
| | | | | | | | 2, L0471: 2, H0494: 2, | | |
| | | | | | | | S0438: 2, H0647: 2, S0422: | | |
| | | | | | | | 2, S0002: 2, L0646: 2, | | |
| | | | | | | | L0794: 2, L0804: 2, L0775: | | |
| | | | | | | | 2, L0653: 2, L0776: 2, | | |
| | | | | | | | L0517: 2, L0666: 2, L2657: | | |
| | | | | | | | 2, H0144: 2, L0438: 2, | | |
| | | | | | | | H0547: 2, H0672: 2, S0330: | | |
| | | | | | | | 2, H0521: 2, S0406: 2, | | |
| | | | | | | | H0786: 2, H0626: 2, S3014: | | |
| | | | | | | | 2, L0750: 2, L0780: 2, | | |
| | | | | | | | L0752: 2, H0624: 1, H0710: | | |
| | | | | | | | 1, L3643: 1, H0686: 1, | | |
| | | | | | | | H0685: 1, H0713: 1, H0717: | | |
| | | | | | | | 1, H0650: 1, L2910: 1, | | |
| | | | | | | | L3848: 1, S0116: 1, H0664: | | |
| | | | | | | | 1, L2282: 1, H0638: 1, | | |
| | | | | | | | S0418: 1, S0420: 1, L0005: | | |
| | | | | | | | 1, S0358: 1, H0742: 1, | | |
| | | | | | | | S0476: 1, H0770: 1, H0778: | | |
| | | | | | | | 1, H0777: 1, L3082: 1, | | |
| | | | | | | | L3387: 1, S0222: 1, H0586: | | |
| | | | | | | | 1, H0574: 1, H0791: 1, | | |
| | | | | | | | T0039: 1, L2578: 1, L3653: | | |
| | | | | | | | 1, H0013: 1, L0021: 1, | | |
| | | | | | | | H0575: 1, H0253: 1, S0346: | | |
| | | | | | | | 1, H0581: 1, H0374: 1, | | |
| | | | | | | | H0746: 1, H0309: 1, H0546: | | |
| | | | | | | | 1, H0024: 1, H0373: 1, | | |
| | | | | | | | H0051: 1, H0356: 1, H0266: | | |
| | | | | | | | 1, H0179: 1, S0318: 1, | | |
| | | | | | | | S0316: 1, H0687: 1, H0288: | | |
| | | | | | | | 1, H0031: 1, L0142: 1, | | |
| | | | | | | | H0628: 1, H0032: 1, H0673: | | |
| | | | | | | | 1, S0036: 1, H0090: 1, | | |
| | | | | | | | H0591: 1, H0038: 1, H0040: | | |
| | | | | | | | 1, H0616: 1, H0063: 1, | | |
| | | | | | | | H0413: 1, H0561: 1, H0366: | | |
| | | | | | | | 1, H0641: 1, S0144: 1, | | |
| | | | | | | | H0529: 1, L0762: 1, L0769: | | |
| | | | | | | | 1, L0800: 1, L0641: 1, | | |
| | | | | | | | L0773: 1, L6413: 1, L6417: | | |
| | | | | | | | 1, L6425: 1, L0381: 1, | | |
| | | | | | | | L0522: 1, L0375: 1, L0784: | | |
| | | | | | | | 1, L0606: 1, L0661: 1, | | |
| | | | | | | | L0783: 1, L0529: 1, L5623: | | |
| | | | | | | | 1, L0368: 1, L0787: 1, | | |
| | | | | | | | L2269: 1, L4559: 1, L0664: | | |
| | | | | | | | 1, L3391: 1, L3634: 1, | | |
| | | | | | | | L2263: 1, L2261: 1, L2264: | | |
| | | | | | | | 1, L5244: 1, L5389: 1, | | |
| | | | | | | | H0701: 1, H0762: 1, L3827: | | |
| | | | | | | | 1, H0520: 1, H0684: 1, | | |
| | | | | | | | H0659: 1, H0670: 1, H0648: | | |
| | | | | | | | 1, H0651: 1, H0539: 1, | | |
| | | | | | | | S0380: 1, S0152: 1, H0522: | | |
| | | | | | | | 1, H0696: 1, S0044: 1, | | |
| | | | | | | | H0774: 1, H0478: 1, L0756: | | |
| | | | | | | | 1, L0753: 1, S0031: 1, | | |
| | | | | | | | H0595: 1, S0434: 1, S0436: | | |
| | | | | | | | 1, L0592: 1, S0011: 1, | | |
| | | | | | | | H0653: 1, S0192: 1, S0242: | | |
| | | | | | | | 1, H0542: 1, H0543: 1, | | |
| | | | | | | | H0422: 1, L3359: 1 and | | |
| | | | | | | | H0352: 1. | | |
| 96 | HIGBR51 | 1337743 | 106 | 5-466 | 288 | | S0378: 3, S0380: 3, H0764: | | |
| | | | | | | | 2, H0766: 2 and L4558: 1. | | |
| 97 | HECKK69 | 1365199 | 107 | 19-312 | 289 | Ser-35 to Thr-45. | H0770: 3, H0773: 2, | | |
| | | | | | | | H0781: 2, H0772: 1, H0592: | | |
| | | | | | | | 1, H0081: 1, H0099: 1, | | |
| | | | | | | | S0448: 1, H0767: 1, L0764: | | |
| | | | | | | | 1, L0648: 1, H0780: 1 and | | |
| | | | | | | | S0328: 1. | | |
| 98 | HEDEY26 | 1365264 | 108 | 233-592 | 290 | Gly-31 to Lys-53, | S0434: 5, H0593: 3, S0476: | | |
| | | | | | | Pro-71 to Cys-77, | 2, L3526: 2, H0046: 2, | | |
| | | | | | | His-79 to Cys-103. | H0024: 2, H0771: 1, L0021: | | |
| | | | | | | | 1, H0042: 1, H0575: 1, | | |
| | | | | | | | H0014: 1, T0023: 1, H0649: | | |
| | | | | | | | 1, L0809: 1, L0664: 1, | | |
| | | | | | | | H0783: 1, H0648: 1, S0328: | | |
| | | | | | | | 1, S0044: 1, L0751: 1 and | | |
| | | | | | | | L0601: 1. | | |
| 99 | HEFHJ61 | 1362894 | 109 | 37-1107 | 291 | Gly-11 to Gly-18, | S0358: 13, L0601: 13, | 5 | |
| | | | | | | Glu-52 to Glu-57, | S0354: 10, L0755: 10, | | |
| | | | | | | Thr-91 to His-104, | S0434: 10, H0543: 9, | | |
| | | | | | | Gly-122 to Leu-128, | H0083: 8, L0771: 8, L0749: | | |
| | | | | | | Thr-163 to Arg-172, | 8, H0135: 7, L0769: 7, | | |
| | | | | | | Ser-187 to Trp-196, | L0748: 7, L0758: 7, S0278: | | |
| | | | | | | Asp-205 to Asp-212, | 6, H0620: 6, H0510: 6, | | |
| | | | | | | Leu-230 to Asn-238, | L0666: 6, L0751: 6, H0545: | | |
| | | | | | | Thr-281 to Ser-286, | 5, L0761: 5, L0794: 5, | | |
| | | | | | | Lys-300 to Ser-315, | L0809: 5, L0665: 5, L0754: | | |
| | | | | | | Gln-346 to Tyr-356. | 5, L0757: 5, H0265: 4, | | |
| | | | | | | | H0585: 4, S0360: 4, H0792: | | |
| | | | | | | | 4, H0553: 4, H0059: 4, | | |
| | | | | | | | H0494: 4, L0766: 4, L0774: | | |
| | | | | | | | 4, L0657: 4, L0659: 4, | | |
| | | | | | | | L0664: 4, L2262: 4, L2654: | | |
| | | | | | | | 4, S0330: 4, H0539: 4, | | |
| | | | | | | | S0152: 4, H0521: 4, S0027: | | |
| | | | | | | | 4, L0740: 4, L0750: 4, | | |
| | | | | | | | L0752: 4, L0731: 4, S0436: | | |
| | | | | | | | 4, S0418: 3, S0420: 3, | | |
| | | | | | | | S0408: 3, H0637: 3, S0476: | | |
| | | | | | | | 3, H0772: 3, L3388: 3, | | |
| | | | | | | | H0050: 3, H0373: 3, H0124: | | |
| | | | | | | | 3, H0100: 3, L0770: 3, | | |
| | | | | | | | L0372: 3, L0803: 3, L0653: | | |
| | | | | | | | 3, L0776: 3, L2263: 3, | | |
| | | | | | | | L3827: 3, H0519: 3, H0555: | | |
| | | | | | | | 3, L0439: 3, L0777: 3, | | |
| | | | | | | | L0599: 3, L5229: 3, H0740: | | |
| | | | | | | | 2, H0295: 2, H0294: 2, | | |
| | | | | | | | H0657: 2, H0662: 2, H0580: | | |
| | | | | | | | 2, S0045: 2, H0559: 2, | | |
| | | | | | | | H0618: 2, H0052: 2, H0251: | | |
| | | | | | | | 2, H0046: 2, H0012: 2, | | |
| | | | | | | | H0014: 2, H0039: 2, H0031: | | |
| | | | | | | | 2, H0617: 2, H0616: 2, | | |
| | | | | | | | H0551: 2, H0623: 2, S0438: | | |
| | | | | | | | 2, S0440: 2, H0509: 2, | | |
| | | | | | | | S0144: 2, L0763: 2, L0637: | | |
| | | | | | | | 2, L0374: 2, L0662: 2, | | |
| | | | | | | | L0775: 2, L0651: 2, L0806: | | |
| | | | | | | | 2, L0805: 2, L0663: 2, | | |
| | | | | | | | L3871: 2, S0374: 2, L0438: | | |
| | | | | | | | 2, L3824: 2, H0547: 2, | | |
| | | | | | | | S0126: 2, H0670: 2, H0754: | | |
| | | | | | | | 2, H0753: 2, H0522: 2, | | |
| | | | | | | | S0032: 2, L0747: 2, L0759: | | |
| | | | | | | | 2, H0445: 2, L0596: 2, | | |
| | | | | | | | L0581: 2, L0608: 2, H0423: | | |
| | | | | | | | 2, H0422: 2, L3804: 2, | | |
| | | | | | | | H0556: 1, H0141: 1, H0695: | | |
| | | | | | | | 1, H0709: 1, H0685: 1, | | |
| | | | | | | | S0040: 1, H0713: 1, S0114: | | |
| | | | | | | | 1, S0134: 1, H0583: 1, | | |
| | | | | | | | H0656: 1, L0415: 1, H0341: | | |
| | | | | | | | 1, H0663: 1, H0664: 1, | | |
| | | | | | | | H0305: 1, S0356: 1, S0376: | | |
| | | | | | | | 1, S0444: 1, H0729: 1, | | |
| | | | | | | | H0730: 1, S0007: 1, H0747: | | |
| | | | | | | | 1, H0749: 1, H0771: 1, | | |
| | | | | | | | H0770: 1, H0776: 1, L5012: | | |
| | | | | | | | 1, H0393: 1, H0549: 1, | | |
| | | | | | | | H0370: 1, H0392: 1, H0391: | | |
| | | | | | | | 1, H0586: 1, L3816: 1, | | |
| | | | | | | | H0331: 1, H0257: 1, H0485: | | |
| | | | | | | | 1, H0486: 1, T0060: 1, | | |
| | | | | | | | H0250: 1, L0022: 1, H0575: | | |
| | | | | | | | 1, H0253: 1, H0505: 1, | | |
| | | | | | | | H0318: 1, H0581: 1, H0546: | | |
| | | | | | | | 1, H0150: 1, H0041: 1, | | |
| | | | | | | | H0572: 1, H0569: 1, H0123: | | |
| | | | | | | | 1, H0081: 1, L0471: 1, | | |
| | | | | | | | H0024: 1, S0051: 1, H0375: | | |
| | | | | | | | 1, H0594: 1, S6028: 1, | | |
| | | | | | | | H0188: 1, H0292: 1, H0286: | | |
| | | | | | | | 1, H0328: 1, H0615: 1, | | |
| | | | | | | | H0428: 1, H0622: 1, L0483: | | |
| | | | | | | | 1, H0112: 1, H0424: 1, | | |
| | | | | | | | H0418: 1, H0628: 1, H0606: | | |
| | | | | | | | 1, S0036: 1, H0038: 1, | | |
| | | | | | | | H0634: 1, H0087: 1, H0264: | | |
| | | | | | | | 1, H0268: 1, H0269: 1, | | |
| | | | | | | | H0413: 1, S0038: 1, T0042: | | |
| | | | | | | | 1, S0016: 1, H0561: 1, | | |
| | | | | | | | H0745: 1, H0132: 1, H0131: | | |
| | | | | | | | 1, S0150: 1, H0647: 1, | | |
| | | | | | | | H0529: 1, L0638: 1, L3905: | | |
| | | | | | | | 1, L6432: 1, L0772: 1, | | |
| | | | | | | | L0646: 1, L0764: 1, L0773: | | |
| | | | | | | | 1, L7065: 1, L6413: 1, | | |
| | | | | | | | L6425: 1, L0648: 1, L0626: | | |
| | | | | | | | 1, L0649: 1, L0386: 1, | | |
| | | | | | | | L0388: 1, L0784: 1, L0652: | | |
| | | | | | | | 1, L0654: 1, L0655: 1, | | |
| | | | | | | | L0540: 1, L0783: 1, L0383: | | |
| | | | | | | | 1, L0543: 1, L5622: 1, | | |
| | | | | | | | L0792: 1, L6411: 1, L0708: | | |
| | | | | | | | 1, L2651: 1, L2265: 1, | | |
| | | | | | | | L4773: 1, L3663: 1, L2258: | | |
| | | | | | | | 1, L2260: 1, L0710: 1, | | |
| | | | | | | | L3641: 1, L5244: 1, L5241: | | |
| | | | | | | | 1, L5389: 1, H0144: 1, | | |
| | | | | | | | H0698: 1, H0703: 1, L3826: | | |
| | | | | | | | 1, H0711: 1, H0690: 1, | | |
| | | | | | | | H0435: 1, H0672: 1, H0518: | | |
| | | | | | | | 1, L3832: 1, H0704: 1, | | |
| | | | | | | | S0404: 1, S0406: 1, H0786: | | |
| | | | | | | | 1, H0785: 1, H0478: 1, | | |
| | | | | | | | S3012: 1, S0390: 1, S0037: | | |
| | | | | | | | 1, L0745: 1, L0756: 1, | | |
| | | | | | | | L0786: 1, L0780: 1, L0753: | | |
| | | | | | | | 1, S0260: 1, H0444: 1, | | |
| | | | | | | | L0603: 1, L0366: 1, H0667: | | |
| | | | | | | | 1, H0136: 1, S0276: 1, | | |
| | | | | | | | H0542: 1, H0801: 1, H0800: | | |
| | | | | | | | 1, S0424: 1, L3376: 1, | | |
| | | | | | | | L0600: 1 and H0352: 1. | | |
| 100 | HEHXH94 | 1349088 | 110 | 170-433 | 292 | Gly-50 to Lys-62. | L0638: 1, L0659: 1, L0666: | | |
| | | | | | | | 1, L0665: 1 and H0781: 1. | | |
| 101 | HEFHC80 | 1374282 | 111 | 26-892 | 293 | Gly-37 to Asp-48, | S0358: 8, H0457: 6, | 6p24 | 125647, |
| | | | | | | Tyr-99 to Pro-108, | L0777: 6, S0436: 6, L0748: | | 125647, |
| | | | | | | Pro-117 to Asp-123, | 5, H0156: 4, L0776: 4, | | 125647, |
| | | | | | | Pro-143 to Pro-149, | L0439: 4, H0341: 3, S0418: | | 125647, |
| | | | | | | Gly-194 to Pro-199, | 3, S0142: 3, L0758: 3, | | 134570, |
| | | | | | | Ala-243 to Ala-248, | H0685: 2, S0420: 2, S0046: | | 600429, |
| | | | | | | Phe-251 to Gly-259, | 2, H0370: 2, H0545: 2, | | 601900 |
| | | | | | | Pro-277 to Glu-282. | H0012: 2, H0617: 2, H0264: | | |
| | | | | | | | 2, H0494: 2, L0769: 2, | | |
| | | | | | | | L6418: 2, L0766: 2, L0775: | | |
| | | | | | | | 2, L0807: 2, L3820: 2, | | |
| | | | | | | | H0660: 2, H0539: 2, L0747: | | |
| | | | | | | | 2, L0731: 2, L0596: 2, | | |
| | | | | | | | H0422: 2, H0506: 2, H0265: | | |
| | | | | | | | 1, H0556: 1, H0140: 1, | | |
| | | | | | | | H0661: 1, H0662: 1, H0761: | | |
| | | | | | | | 1, H0638: 1, L1562: 1, | | |
| | | | | | | | S0356: 1, S0444: 1, S0410: | | |
| | | | | | | | 1, L2319: 1, H0729: 1, | | |
| | | | | | | | H0722: 1, H0728: 1, H0776: | | |
| | | | | | | | 1, H0393: 1, L5404: 1, | | |
| | | | | | | | S0278: 1, H0549: 1, L4845: | | |
| | | | | | | | 1, H0231: 1, L0738: 1, | | |
| | | | | | | | H0081: 1, L0471: 1, H0620: | | |
| | | | | | | | 1, S0051: 1, H0083: 1, | | |
| | | | | | | | H0594: 1, H0031: 1, H0181: | | |
| | | | | | | | 1, H0673: 1, H0135: 1, | | |
| | | | | | | | H0038: 1, H0551: 1, S0440: | | |
| | | | | | | | 1, S0150: 1, H0773: 1, | | |
| | | | | | | | S0422: 1, L0763: 1, L3905: | | |
| | | | | | | | 1, L0372: 1, L0800: 1, | | |
| | | | | | | | L0553: 1, L0773: 1, L0768: | | |
| | | | | | | | 1, L0774: 1, L0805: 1, | | |
| | | | | | | | L0655: 1, L0518: 1, L0783: | | |
| | | | | | | | 1, L0809: 1, L0519: 1, | | |
| | | | | | | | L6411: 1, L3635: 1, L2258: | | |
| | | | | | | | 1, L2260: 1, L0710: 1, | | |
| | | | | | | | L5244: 1, S0374: 1, H0764: | | |
| | | | | | | | 1, H0593: 1, H0690: 1, | | |
| | | | | | | | H0666: 1, H0766: 1, S0392: | | |
| | | | | | | | 1, L0750: 1, L0759: 1, | | |
| | | | | | | | S0434: 1 and H0543: 1. | | |
| 102 | HEDEJ55 | 1374272 | 112 | 96-710 | 294 | Ser-32 to Cys-38, | S0286: 103, S0284: 85, | 2q37.3 | 603426, |
| | | | | | | Ser-85 to Arg-93, | S0290: 50, S0288: 46, | | 605286, |
| | | | | | | Arg-190 to Glu-195, | S0302: 10, S0262: 7, L3832: | | 605934 |
| | | | | | | Leu-199 to Lys-204. | 6, H0623: 5, H0717: 4, | | |
| | | | | | | | H0547: 3, L0439: 3, S0358: | | |
| | | | | | | | 2, H0013: 2, H0427: 2, | | |
| | | | | | | | H0520: 2, H0624: 1, S0418: | | |
| | | | | | | | 1, H0771: 1, H0777: 1, | | |
| | | | | | | | H0619: 1, L0471: 1, H0011: | | |
| | | | | | | | 1, H0355: 1, H0252: 1, | | |
| | | | | | | | H0615: 1, H0553: 1, H0628: | | |
| | | | | | | | 1, H0617: 1, H0056: 1, | | |
| | | | | | | | H0646: 1, H0773: 1, H0725: | | |
| | | | | | | | 1, L3831: 1, H0689: 1, | | |
| | | | | | | | H0518: 1, L0754: 1 and | | |
| | | | | | | | S0196: 1. | | |
| 103 | HEEMW15 | 1374275 | 113 | 101-577 | 295 | Pro-41 to Ser-51, | H0586: 1, H0427: 1, | | |
| | | | | | | Ala-61 to Lys-71, | H0706: 1, H0773: 1, L0649: | | |
| | | | | | | Ser-91 to Leu-103, | 1 and S0390: 1. | | |
| | | | | | | Ser-143 to Ser-158. | | | |
| 104 | HMFIH88 | 1374300 | 114 | 42-728 | 296 | Pro-45 to Glu-57, | H0778: 1 | | |
| | | | | | | Gly-127 to Leu-133, | | | |
| | | | | | | Gln-151 to Val-156, | | | |
| | | | | | | Ser-204 to Gly-209, | | | |
| | | | | | | Pro-218 to Leu-227. | | | |
| 105 | HEFJN45 | 1355411 | 115 | 308-493 | 297 | Glu-39 to Asp-45, | L0748: 10, L0754: 7, | | |
| | | | | | | Glu-51 to Thr-56. | H0521: 6, L0769: 5, L0755: | | |
| | | | | | | | 5, L0731: 5, L0759: 5, | | |
| | | | | | | | H0617: 4, L0772: 4, H0265: | | |
| | | | | | | | 3, S0418: 3, S0420: 3, | | |
| | | | | | | | L3078: 3, T0040: 3, H0674: | | |
| | | | | | | | 3, L0766: 3, H0672: 3, | | |
| | | | | | | | L0747: 3, L0749: 3, L0752: | | |
| | | | | | | | 3, H0218: 2, H0141: 2, | | |
| | | | | | | | L2888: 2, S0442: 2, S0360: | | |
| | | | | | | | 2, H0580: 2, L2498: 2, | | |
| | | | | | | | H0428: 2, H0166: 2, L0761: | | |
| | | | | | | | 2, L0768: 2, L0775: 2, | | |
| | | | | | | | L0384: 2, L0809: 2, L0665: | | |
| | | | | | | | 2, L2263: 2, L5389: 2, | | |
| | | | | | | | L2654: 2, S0328: 2, H0522: | | |
| | | | | | | | 2, S0406: 2, L0740: 2, | | |
| | | | | | | | L0751: 2, L0750: 2, H0445: | | |
| | | | | | | | 2, L0599: 2, L0608: 2, | | |
| | | | | | | | H0556: 1, H0585: 1, H0710: | | |
| | | | | | | | 1, H0295: 1, L3401: 1, | | |
| | | | | | | | S0114: 1, H0638: 1, S0376: | | |
| | | | | | | | 1, H0742: 1, H0722: 1, | | |
| | | | | | | | H0777: 1, H0776: 1, H0393: | | |
| | | | | | | | 1, S0278: 1, H0333: 1, | | |
| | | | | | | | H0427: 1, H0156: 1, L0021: | | |
| | | | | | | | 1, H0253: 1, H0052: 1, | | |
| | | | | | | | H0545: 1, H0046: 1, H0620: | | |
| | | | | | | | 1, H0083: 1, H0594: 1, | | |
| | | | | | | | S0318: 1, H0688: 1, H0604: | | |
| | | | | | | | 1, H0424: 1, H0030: 1, | | |
| | | | | | | | H0644: 1, H0063: 1, H0551: | | |
| | | | | | | | 1, H0413: 1, H0059: 1, | | |
| | | | | | | | L0564: 1, H0560: 1, H0745: | | |
| | | | | | | | 1, H0646: 1, S0144: 1, | | |
| | | | | | | | S0002: 1, S0426: 1, L5156: | | |
| | | | | | | | 1, L5170: 1, H0529: 1, | | |
| | | | | | | | L4557: 1, L0770: 1, L0796: | | |
| | | | | | | | 1, L3904: 1, L6432: 1, | | |
| | | | | | | | L7069: 1, L0642: 1, L0374: | | |
| | | | | | | | 1, L0771: 1, L6413: 1, | | |
| | | | | | | | L6420: 1, L6419: 1, L6425: | | |
| | | | | | | | 1, L6415: 1, L0662: 1, | | |
| | | | | | | | L0363: 1, L0381: 1, L0774: | | |
| | | | | | | | 1, L0651: 1, L0776: 1, | | |
| | | | | | | | L0661: 1, L0657: 1, L0658: | | |
| | | | | | | | 1, L0659: 1, L0782: 1, | | |
| | | | | | | | L0382: 1, L0666: 1, L0663: | | |
| | | | | | | | 1, L4778: 1, L4779: 1, | | |
| | | | | | | | L2259: 1, H0144: 1, S0374: | | |
| | | | | | | | 1, H0764: 1, H0519: 1, | | |
| | | | | | | | S0292: 1, H0682: 1, H0648: | | |
| | | | | | | | 1, H0754: 1, H0696: 1; | | |
| | | | | | | | S0404: 1, H0786: 1, S0032: | | |
| | | | | | | | 1, L0743: 1, L0745: 1, | | |
| | | | | | | | L0777: 1, L0780: 1, L0753: | | |
| | | | | | | | 1, L0757: 1, L0758: 1, | | |
| | | | | | | | H0444: 1, L2094: 1, L0581: | | |
| | | | | | | | 1, L0595: 1, L0366: 1, | | |
| | | | | | | | S0276: 1, H0422: 1 and | | |
| | | | | | | | S0424: 1. | | |
| | HEFJN45 | 1363530 | 173 | 644-853 | 355 | Glu-39 to Asp-45, | | | |
| | | | | | | Glu-51 to Thr-56, | | | |
| | | | | | | Gly-63 to Lys-69. | | | |
| 106 | HEFKA79 | 1362919 | 116 | 46-579 | 298 | Val-107 to Lys-112. | H0529: 2, H0716: 1, | 6q25.3 | 100678, |
| | | | | | | | S0212: 1, S0420: 1, S0476: | | 180020, |
| | | | | | | | 1, H0777: 1, H0013: 1, | | 600320, |
| | | | | | | | S0049: 1, S0003: 1, H0615: | | 600883, |
| | | | | | | | 1, H0628: 1, H0212: 1, | | 602544, |
| | | | | | | | S0210: 1, L2257: 1, H0691: | | 603175 |
| | | | | | | | 1, H0519: 1, H0766: 1, | | |
| | | | | | | | L0759: 1 and H0543: 1. | | |
| 107 | HEGLH36 | 1374285 | 117 | 34-408 | 299 | Ser-25 to Cys-35, | H0772: 1 | 4q12 | 103600, |
| | | | | | | Ser-90 to Gly-96, | | | 103600, |
| | | | | | | Lys-114 to Gly-121. | | | 103600, |
| | | | | | | | | | 104150, |
| | | | | | | | | | 104150, |
| | | | | | | | | | 104500, |
| | | | | | | | | | 139200, |
| | | | | | | | | | 164920, |
| | | | | | | | | | 164920, |
| | | | | | | | | | 164920, |
| | | | | | | | | | 164920, |
| | | | | | | | | | 164920, |
| | | | | | | | | | 170650, |
| | | | | | | | | | 173490, |
| | | | | | | | | | 173490, |
| | | | | | | | | | 191306, |
| | | | | | | | | | 600900, |
| | | | | | | | | | 604332 |
| 108 | HMFHX51 | 1374298 | 118 | 18-560 | 300 | Glu-14 to Arg-19, | H0682: 10, H0521: 10, | 19p13.2 | 108725, |
| | | | | | | Glu-73 to Gly-80, | H0617: 8, H0423: 7, S0360: | | 120700, |
| | | | | | | Ala-104 to Glu-114, | 6, H0754: 6, H0740: 5, | | 133171, |
| | | | | | | Glu-135 to Asn-141, | H0620: 5, H0547: 5, S0406: | | 146738, |
| | | | | | | Asp-150 to Ser-161. | 5, H0657: 4, H0778: 4, | | 147670, |
| | | | | | | | H0687: 4, H0641: 4, S0422: | | 147670, |
| | | | | | | | 4, H0666: 4, H0584: 3, | | 147670, |
| | | | | | | | H0638: 3, H0618: 3, H0039: | | 147840, |
| | | | | | | | 3, H0773: 3, L0708: 3, | | 151440, |
| | | | | | | | H0435: 3, H0670: 3, S0328: | | 164953, |
| | | | | | | | 3, H0522: 3, H0445: 3, | | 177060, |
| | | | | | | | S0434: 3, H0585: 2, H0713: | | 231670, |
| | | | | | | | 2, H0717: 2, H0716: 2, | | 277600, |
| | | | | | | | T0049: 2, H0341: 2, L0946: | | 600276, |
| | | | | | | | 2, H0761: 2, S0376: 2, | | 600957, |
| | | | | | | | H0730: 2, S0476: 2, H0550: | | 601843, |
| | | | | | | | 2, H0586: 2, H0559: 2, | | 603386, |
| | | | | | | | H0486: 2, H0575: 2, H0253: | | 604781, |
| | | | | | | | 2, H0581: 2, H0622: 2, | | 605248, |
| | | | | | | | H0087: 2, H0059: 2, H0625: | | 606482, |
| | | | | | | | 2, H0509: 2, H0649: 2, | | 606945, |
| | | | | | | | L3811: 2, L3826: 2, L3204: | | 607324 |
| | | | | | | | 2, H0689: 2, H0658: 2, | | |
| | | | | | | | L0581: 2, L0361: 2, S0026: | | |
| | | | | | | | 2, H0543: 2, H0801: 2, | | |
| | | | | | | | H0800: 2, S0424: 2, L3610: | | |
| | | | | | | | 2, H0171: 1, H0556: 1, | | |
| | | | | | | | S0040: 1, H0650: 1, H0803: | | |
| | | | | | | | 1, H0255: 1, H0663: 1, | | |
| | | | | | | | H0125: 1, S0356: 1, S0442: | | |
| | | | | | | | 1, S0354: 1, S0408: 1, | | |
| | | | | | | | H0722: 1, H0771: 1, H0776: | | |
| | | | | | | | 1, H0792: 1, S0278: 1, | | |
| | | | | | | | H0587: 1, L0623: 1, H0250: | | |
| | | | | | | | 1, L0021: 1, H0599: 1, | | |
| | | | | | | | T0082: 1, S0474: 1, H0327: | | |
| | | | | | | | 1, H0530: 1, H0150: 1, | | |
| | | | | | | | L0471: 1, H0012: 1, H0023: | | |
| | | | | | | | 1, H0024: 1, H0014: 1, | | |
| | | | | | | | S0388: 1, H0071: 1, H0107: | | |
| | | | | | | | 1, H0510: 1, H0247: 1, | | |
| | | | | | | | H0271: 1, H0286: 1, H0553: | | |
| | | | | | | | 1, H0181: 1, H0606: 1, | | |
| | | | | | | | H0124: 1, H0316: 1, H0477: | | |
| | | | | | | | 1, H0100: 1, S0450: 1, | | |
| | | | | | | | S0438: 1, H0529: 1, L3904: | | |
| | | | | | | | 1, L0523: 1, L0657: 1, | | |
| | | | | | | | L0382: 1, L2262: 1, L5244: | | |
| | | | | | | | 1, L5461: 1, H0698: 1, | | |
| | | | | | | | H0781: 1, H0762: 1, H0765: | | |
| | | | | | | | 1, H0726: 1, H0519: 1, | | |
| | | | | | | | L3209: 1, H0683: 1, H0684: | | |
| | | | | | | | 1, H0660: 1, H0753: 1, | | |
| | | | | | | | S0146: 1, H0576: 1, S0027: | | |
| | | | | | | | 1, L0743: 1, L0751: 1, | | |
| | | | | | | | S0031: 1, L0599: 1, H0542: | | |
| | | | | | | | 1, S0456: 1, L4424: 1, | | |
| | | | | | | | L3633: 1 and H0352: 1. | | |
| 109 | HEIDS26 | 1374291 | 119 | 132-434 | 301 | Met-1 to Ser-10, | H0585: 10, L0743: 4, | | |
| | | | | | | Ala-69 to Trp-74. | L0800: 3, L0659: 3, H0265: | | |
| | | | | | | | 2, S0360: 2, H0486: 2, | | |
| | | | | | | | L0763: 2, S0126: 2, S0328: | | |
| | | | | | | | 2, L0744: 2, H0423: 2, | | |
| | | | | | | | H0422: 2, H0782: 1, H0657: | | |
| | | | | | | | 1, S0298: 1, S0476: 1, | | |
| | | | | | | | H0457: 1, H0123: 1, S0022: | | |
| | | | | | | | 1, L0143: 1, H0634: 1, | | |
| | | | | | | | H0623: 1, H0100: 1, L0475: | | |
| | | | | | | | 1, S0450: 1, L0446: 1, | | |
| | | | | | | | L6432: 1, L7069: 1, L6425: | | |
| | | | | | | | 1, L6421: 1, L0662: 1, | | |
| | | | | | | | L0805: 1, L0776: 1, L0666: | | |
| | | | | | | | 1, L2654: 1, H0783: 1, | | |
| | | | | | | | H0658: 1, H0521: 1, H0522: | | |
| | | | | | | | 1, S0406: 1, H0555: 1, | | |
| | | | | | | | L0751: 1, L0747: 1, H0445: | | |
| | | | | | | | 1, L0366: 1, H0543: 1 and | | |
| | | | | | | | H0506: 1. | | |
| 110 | HMFHL01 | 1374295 | 120 | 32-442 | 302 | Ser-25 to Cys-35, | H0778: 1 | 4q12 | 103600, |
| | | | | | | Gly-75 to Cys-81, | | | 103600, |
| | | | | | | Ser-90 to Gly-96, | | | 103600, |
| | | | | | | Asp-123 to Gly-130. | | | 104150, |
| | | | | | | | | | 104150, |
| | | | | | | | | | 104500, |
| | | | | | | | | | 139200, |
| | | | | | | | | | 164920, |
| | | | | | | | | | 164920, |
| | | | | | | | | | 164920, |
| | | | | | | | | | 164920, |
| | | | | | | | | | 164920, |
| | | | | | | | | | 170650, |
| | | | | | | | | | 173490, |
| | | | | | | | | | 173490, |
| | | | | | | | | | 191306, |
| | | | | | | | | | 600900, |
| | | | | | | | | | 604332 |
| 111 | HECKQ90 | 1349315 | 121 | 14-226 | 303 | | H0013: 3, H0040: 3, | | |
| | | | | | | | L0502: 3, L0748: 3, L2919: | | |
| | | | | | | | 2, H0341: 2, S0007: 2, | | |
| | | | | | | | L3491: 2, H0539: 2, L0751: | | |
| | | | | | | | 2, L0780: 2, L2289: 1, | | |
| | | | | | | | L1441: 1, H0770: 1, L3816: | | |
| | | | | | | | 1, L2494: 1, H0156: 1, | | |
| | | | | | | | H0318: 1, H0046: 1, H0009: | | |
| | | | | | | | 1, H0050: 1, H0239: 1, | | |
| | | | | | | | H0328: 1, H0647: 1, L0664: | | |
| | | | | | | | 1, H0144: 1, L2453: 1, | | |
| | | | | | | | L3811: 1, H0593: 1, L3212: | | |
| | | | | | | | 1, H0753: 1, L3832: 1, | | |
| | | | | | | | L3374: 1, L3612: 1 and | | |
| | | | | | | | L3804: 1. | | |
| 112 | HEIDA30 | 1367471 | 122 | 105-542 | 304 | Pro-92 to Ser-102, | L6426: 7, L0750: 6, L0731: | | |
| | | | | | | Leu-127 to Tyr-134. | 6, L0748: 4, S0410: 3, | | |
| | | | | | | | H0546: 3, H0545: 3, L0770: | | |
| | | | | | | | 3, L0774: 3, S0406: 3, | | |
| | | | | | | | L0749: 3, H0542: 3, H0012: | | |
| | | | | | | | 2, S0440: 2, L0769: 2, | | |
| | | | | | | | L0764: 2, L0766: 2, L0806: | | |
| | | | | | | | 2, L6424: 2, L0783: 2, | | |
| | | | | | | | L0809: 2, L0665: 2, H0783: | | |
| | | | | | | | 2, L0747: 2, L0777: 2, | | |
| | | | | | | | L0780: 2, L0757: 2, L0758: | | |
| | | | | | | | 2, L0604: 2, S0026: 2, | | |
| | | | | | | | H0727: 1, H0295: 1, H0803: | | |
| | | | | | | | 1, S0212: 1, H0459: 1, | | |
| | | | | | | | H0638: 1, S0418: 1, S0420: | | |
| | | | | | | | 1, S0444: 1, S0360: 1, | | |
| | | | | | | | H0728: 1, L4970: 1, L4949: | | |
| | | | | | | | 1, H0770: 1, H0792: 1, | | |
| | | | | | | | S0222: 1, H0611: 1, H0791: | | |
| | | | | | | | 1, L0623: 1, H0069: 1, | | |
| | | | | | | | L0021: 1, H0618: 1, T0048: | | |
| | | | | | | | 1, H0318: 1, H0744: 1, | | |
| | | | | | | | H0309: 1, H0263: 1, H0620: | | |
| | | | | | | | 1, H0375: 1, H0328: 1, | | |
| | | | | | | | H0622: 1, H0181: 1, H0617: | | |
| | | | | | | | 1, H0708: 1, S0366: 1, | | |
| | | | | | | | S0036: 1, H0038: 1, H0117: | | |
| | | | | | | | 1, H0494: 1, S0438: 1, | | |
| | | | | | | | H0767: 1, H0646: 1, S0422: | | |
| | | | | | | | 1, L0520: 1, L0763: 1, | | |
| | | | | | | | L4747: 1, L7069: 1, L0772: | | |
| | | | | | | | 1, L0642: 1, L0773: 1, | | |
| | | | | | | | L0768: 1, L0649: 1, L0803: | | |
| | | | | | | | 1, L0775: 1, L0776: 1, | | |
| | | | | | | | L0379: 1, L0659: 1, L0382: | | |
| | | | | | | | 1, L0792: 1, L3821: 1, | | |
| | | | | | | | L2657: 1, L3641: 1, H0144: | | |
| | | | | | | | 1, H0547: 1, S0126: 1, | | |
| | | | | | | | H0689: 1, H0660: 1, H0648: | | |
| | | | | | | | 1, H0756: 1, H0555: 1, | | |
| | | | | | | | H0436: 1, S0390: 1, S0027: | | |
| | | | | | | | 1, L0740: 1, L0755: 1, | | |
| | | | | | | | S0434: 1, H0665: 1, S0192: | | |
| | | | | | | | 1, H0543: 1 and L3630: 1. | | |
| 113 | HEDDM74 | 1365266 | 123 | 320-658 | 305 | | L0751: 7, L0769: 6, L0750: | 19p13.2 | 108725, |
| | | | | | | | 5, L0752: 5, L0771: 4, | | 120700, |
| | | | | | | | L0775: 4, H0052: 3, L0665: | | 133171, |
| | | | | | | | 3, L0758: 3, H0486: 2, | | 146738, |
| | | | | | | | H0620: 2, H0181: 2, L0774: | | 147670, |
| | | | | | | | 2, L0375: 2, L0776: 2, | | 147670, |
| | | | | | | | L0512: 2, L0659: 2, H0520: | | 147670, |
| | | | | | | | 2, L0740: 2, L0747: 2, | | 147840, |
| | | | | | | | L0596: 2, S0276: 2, S0402: | | 151440, |
| | | | | | | | 1, H0662: 1, S0356: 1, | | 164953, |
| | | | | | | | S0358: 1, S0376: 1, S0360: | | 177060, |
| | | | | | | | 1, S0408: 1, H0742: 1, | | 231670, |
| | | | | | | | S0045: 1, H0771: 1, H0770: | | 277600, |
| | | | | | | | 1, H0772: 1, L0717: 1, | | 600276, |
| | | | | | | | H0351: 1, S0222: 1, H0455: | | 600957, |
| | | | | | | | 1, L3655: 1, T0114: 1, | | 601843, |
| | | | | | | | H0635: 1, L0021: 1, H0309: | | 603386, |
| | | | | | | | 1, H0544: 1, H0546: 1, | | 604781, |
| | | | | | | | H0545: 1, H0009: 1, H0123: | | 605248, |
| | | | | | | | 1, H0050: 1, L0471: 1, | | 606482, |
| | | | | | | | H0271: 1, T0006: 1, H0628: | | 606945, |
| | | | | | | | 1, H0617: 1, H0063: 1, | | 607324 |
| | | | | | | | H0116: 1, H0059: 1, H0100: | | |
| | | | | | | | 1, H0494: 1, H0625: 1, | | |
| | | | | | | | L0770: 1, L3904: 1, L0764: | | |
| | | | | | | | 1, L6420: 1, L6421: 1, | | |
| | | | | | | | L0766: 1, L0655: 1, L0657: | | |
| | | | | | | | 1, L0559: 1, L0526: 1, | | |
| | | | | | | | L0783: 1, L0809: 1, L0544: | | |
| | | | | | | | 1, L0529: 1, L4559: 1, | | |
| | | | | | | | L0664: 1, S0428: 1, H0593: | | |
| | | | | | | | 1, H0659: 1, H0648: 1, | | |
| | | | | | | | H0555: 1, L0611: 1, L0756: | | |
| | | | | | | | 1, L0757: 1, S0436: 1, | | |
| | | | | | | | L0588: 1, S0194: 1 and | | |
| | | | | | | | H0422: 1. | | |
| 114 | HEHXC34 | 1365189 | 124 | 28-327 | 306 | Pro-28 to Glu-35, | L0747: 12, H0586: 8, | | |
| | | | | | | Ser-39 to Phe-44, | H0081: 7, H0494: 7, L0376: | | |
| | | | | | | Ala-94 to Gln-99. | 5, H0781: 4, H0592: 2, | | |
| | | | | | | | H0587: 2, H0777: 1, H0772: | | |
| | | | | | | | 1, H0602: 1, H0598: 1, | | |
| | | | | | | | H0512: 1, H0345: 1 and | | |
| | | | | | | | L0758: 1. | | |
| 115 | HEHXL26 | 1351600 | 125 | 17-970 | 307 | Gly-76 to Leu-83, | H0494: 7, H0586: 6, | | |
| | | | | | | Ala-108 to Glu-113, | S0330: 5, H0770: 3, H0772: | | |
| | | | | | | Glu-202 to Gly-209, | 3, H0781: 3, H0602: 2, | | |
| | | | | | | Ser-215 to Phe-224, | H0587: 2, L0806: 2, L0747: | | |
| | | | | | | Gly-236 to Gln-244. | 2, H0081: 1, S0250: 1, | | |
| | | | | | | | H0708: 1, L0648: 1, L0376: | | |
| | | | | | | | 1, L5623: 1, H0780: 1, | | |
| | | | | | | | S0328: 1, H0521: 1 and | | |
| | | | | | | | S3014: 1. | | |
| 116 | HEENT17 | 1362742 | 126 | 265-519 | 308 | Val-50 to Gly-58, | L0761: 14, L0803: 13, | 19p13.3 | 108725, |
| | | | | | | Val-64 to Arg-70. | L0789: 10, L0769: 7, L0800: | | 109480, |
| | | | | | | | 5, L0775: 5, L0766: 4, | | 120700, |
| | | | | | | | L0755: 4, L0774: 3, L0779: | | 130130, |
| | | | | | | | 3, L0745: 2, L0750: 2, | | 130130, |
| | | | | | | | L0777: 2, L0780: 2, H0586: | | 133171, |
| | | | | | | | 1, H0623: 1, H0773: 1, | | 136836, |
| | | | | | | | L0804: 1, L0806: 1, L0807: | | 145981, |
| | | | | | | | 1, L0788: 1, H0555: 1, | | 147141, |
| | | | | | | | L0743: 1, L0747: 1, L0752: | | 147840, |
| | | | | | | | 1, L0731: 1, L0757: 1 and | | 164953, |
| | | | | | | | H0423: 1. | | 181800, |
| | | | | | | | | | 188070, |
| | | | | | | | | | 277600, |
| | | | | | | | | | 600957, |
| | | | | | | | | | 601238, |
| | | | | | | | | | 601240, |
| | | | | | | | | | 601768, |
| | | | | | | | | | 601846, |
| | | | | | | | | | 602018, |
| | | | | | | | | | 602216, |
| | | | | | | | | | 602216, |
| | | | | | | | | | 602216, |
| | | | | | | | | | 602477, |
| | | | | | | | | | 605248 |
| 117 | HEFHB48 | 1365213 | 127 | 720-980 | 309 | Pro-47 to Ala-52, | L0659: 4, L0809: 2, | | |
| | | | | | | His-62 to Gly-72, | H0696: 2, L0439: 2, L0777: | | |
| | | | | | | Thr-80 to Trp-86. | 2, S0358: 1, S0376: 1, | | |
| | | | | | | | H0776: 1, H0575: 1, S0474: | | |
| | | | | | | | 1, H0597: 1, H0545: 1, | | |
| | | | | | | | H0081: 1, H0373: 1, H0271: | | |
| | | | | | | | 1, H0494: 1, L4799: 1, | | |
| | | | | | | | S0150: 1, L4747: 1, L0764: | | |
| | | | | | | | 1, L0783: 1, L4778: 1, | | |
| | | | | | | | L2260: 1, L2654: 1, S0374: | | |
| | | | | | | | 1, H0779: 1, H0724: 1, | | |
| | | | | | | | H0648: 1, S0378: 1, H0753: | | |
| | | | | | | | 1, H0478: 1, L0747: 1, | | |
| | | | | | | | L0779: 1, L0731: 1, L0757: | | |
| | | | | | | | 1, L0604: 1 and S0011: 1. | | |
| | HEFHB48 | 1365212 | 174 | 23-202 | 356 | | | | |
| 118 | HEFIF14 | 1365201 | 128 | 38-442 | 310 | Pro-63 to Val-72, | L0779: 3, S0360: 2, | | |
| | | | | | | Ala-76 to Arg-85. | H0619: 2, H0545: 2, L0771: | | |
| | | | | | | | 2, L0754: 2, H0170: 1, | | |
| | | | | | | | S0040: 1, H0341: 1, S0358: | | |
| | | | | | | | 1, H0776: 1, L3863: 1, | | |
| | | | | | | | H0201: 1, S0364: 1, L0640: | | |
| | | | | | | | 1, L0770: 1, L0796: 1, | | |
| | | | | | | | L0772: 1, L0645: 1, L6417: | | |
| | | | | | | | 1, L6421: 1, L0662: 1, | | |
| | | | | | | | L0774: 1, L0776: 1, L0659: | | |
| | | | | | | | 1, L0783: 1, L0528: 1, | | |
| | | | | | | | L0530: 1, L0664: 1, H0693: | | |
| | | | | | | | 1, S0406: 1, L0748: 1, | | |
| | | | | | | | L0752: 1, L0758: 1 and | | |
| | | | | | | | S0026: 1. | | |
| 119 | HNEMX50 | 1349300 | 129 | 311-499 | 311 | Met-1 to Thr-6. | H0774: 1 | | |
| 120 | HEFJJ04 | 1362845 | 130 | 312-1091 | 312 | Tyr-40 to Glu-48, | H0543: 3, H0265: 1, | | |
| | | | | | | Glu-125 to Arg-131, | H0305: 1, H0638: 1, H0777: | | |
| | | | | | | Lys-143 to Gln-165, | 1, L5080: 1, H0351: 1, | | |
| | | | | | | Gly-173 to Gln-179, | H0266: 1, L4811: 1, H0561: | | |
| | | | | | | Ala-233 to Pro-238. | 1, H0767: 1, L3135: 1, | | |
| | | | | | | | L0763: 1, L0637: 1, L7065: | | |
| | | | | | | | 1, H0134: 1, H0542: 1 and | | |
| | | | | | | | H0423: 1. | | |
| 121 | HEHXW79 | 1365188 | 131 | 19-276 | 313 | Pro-28 to Glu-35, | L0747: 12, H0586: 8, | | |
| | | | | | | Ala-80 to Gln-85. | H0081: 7, H0494: 7, L0376: | | |
| | | | | | | | 5, H0781: 4, H0592: 2, | | |
| | | | | | | | H0587: 2, H0777: 1, H0772: | | |
| | | | | | | | 1, H0602: 1, H0598: 1, | | |
| | | | | | | | H0512: 1, H0345: 1 and | | |
| | | | | | | | L0758: 1. | | |
| 122 | HEHMJ47 | 1367230 | 132 | 374-943 | 314 | Tyr-63 to Leu-72. | L0666: 12, H0046: 9, | 17q21.31 | 109270, |
| | | | | | | | H0556: 5, L0809: 5, L0747: | | 109270, |
| | | | | | | | 4, L0770: 3, L0769: 3, | | 109270, |
| | | | | | | | L0783: 3, H0520: 3, L0439: | | 109270, |
| | | | | | | | 3, L0731: 3, H0664: 2, | | 109270, |
| | | | | | | | S0045: 2, H0123: 2, H0424: | | 109270, |
| | | | | | | | 2, L0637: 2, L6418: 2, | | 120150, |
| | | | | | | | L0775: 2, L0438: 2, S0328: | | 120150, |
| | | | | | | | 2, S0146: 2, H0784: 2, | | 120150, |
| | | | | | | | L0777: 2, L0601: 2, H0542: | | 120150, |
| | | | | | | | 2, L0411: 1, H0265: 1, | | 120150, |
| | | | | | | | H0740: 1, H0294: 1, H0583: | | 120150, |
| | | | | | | | 1, H0650: 1, H0662: 1, | | 120150, |
| | | | | | | | S0420: 1, S0444: 1, H0637: | | 120150, |
| | | | | | | | 1, H0735: 1, S0476: 1, | | 148065, |
| | | | | | | | S0278: 1, H0431: 1, H0370: | | 148080, |
| | | | | | | | 1, H0586: 1, H0587: 1, | | 148080, |
| | | | | | | | H0497: 1, H0790: 1, H0486: | | 148080, |
| | | | | | | | 1, H0013: 1, H0069: 1, | | 154275, |
| | | | | | | | H0575: 1, H0253: 1, H0581: | | 168860, |
| | | | | | | | 1, H0251: 1, H0150: 1, | | 171190, |
| | | | | | | | H0620: 1, T0010: 1, H0083: | | 221820, |
| | | | | | | | 1, H0239: 1, H0594: 1, | | 600119, |
| | | | | | | | H0288: 1, H0290: 1, H0604: | | 600119, |
| | | | | | | | 1, H0553: 1, H0040: 1, | | 600119, |
| | | | | | | | H0087: 1, H0494: 1, H0560: | | 600525, |
| | | | | | | | 1, L0065: 1, S0438: 1, | | 601844 |
| | | | | | | | S0440: 1, H0641: 1, H0633: | | |
| | | | | | | | 1, H0646: 1, L3815: 1, | | |
| | | | | | | | S0422: 1, S0002: 1, H0529: | | |
| | | | | | | | 1, L0763: 1, L7069: 1, | | |
| | | | | | | | L0646: 1, L0800: 1, L0764: | | |
| | | | | | | | 1, L0767: 1, L0649: 1, | | |
| | | | | | | | L0803: 1, L0806: 1, L0653: | | |
| | | | | | | | 1, L0659: 1, L0518: 1, | | |
| | | | | | | | L0789: 1, L0791: 1, S0053: | | |
| | | | | | | | 1, L0708: 1, L3871: 1, | | |
| | | | | | | | H0144: 1, H0701: 1, H0725: | | |
| | | | | | | | 1, H0780: 1, S0148: 1, | | |
| | | | | | | | H0519: 1, H0593: 1, H0754: | | |
| | | | | | | | 1, H0753: 1, S0406: 1, | | |
| | | | | | | | L0748: 1, L0745: 1, L0749: | | |
| | | | | | | | 1, L0750: 1, L0779: 1, | | |
| | | | | | | | L0752: 1, L0758: 1, S0031: | | |
| | | | | | | | 1, S0436: 1, H0800: 1, | | |
| | | | | | | | S0460: 1 and L0600: 1. | | |
| 123 | HRCRE68 | 1365255 | 133 | 2277-2459 | 315 | | L2094: 21, L3809: 18, | 2q32.2 | 600258, |
| | | | | | | | S0192: 12, H0423: 10, | | 600555, |
| | | | | | | | H0422: 8, L2093: 7, H0657: | | 600555, |
| | | | | | | | 5, L0777: 5, H0581: 4, | | 602087 |
| | | | | | | | H0457: 4, L0483: 4, S0328: | | |
| | | | | | | | 4, H0014: 3, H0598: 3, | | |
| | | | | | | | H0591: 3, S0422: 3, L0775: | | |
| | | | | | | | 3, L0659: 3, L5286: 3, | | |
| | | | | | | | L0664: 3, L0665: 3, L3635: | | |
| | | | | | | | 3, H0519: 3, H0648: 3, | | |
| | | | | | | | L0439: 3, L0599: 3, S0412: | | |
| | | | | | | | 3, L5236: 3, H0624: 2, | | |
| | | | | | | | H0556: 2, H0662: 2, S0376: | | |
| | | | | | | | 2, L3649: 2, H0619: 2, | | |
| | | | | | | | H0575: 2, H0545: 2, H0674: | | |
| | | | | | | | 2, H0090: 2, H0412: 2, | | |
| | | | | | | | L3818: 2, L0770: 2, L0521: | | |
| | | | | | | | 2, L0655: 2, L0438: 2, | | |
| | | | | | | | H0435: 2, H0672: 2, H0785: | | |
| | | | | | | | 2, L0756: 2, L0780: 2, | | |
| | | | | | | | L0759: 2, S0436: 2, L0596: | | |
| | | | | | | | 2, H0543: 2, H0170: 1, | | |
| | | | | | | | H0158: 1, L3643: 1, H0686: | | |
| | | | | | | | 1, H0717: 1, H0656: 1, | | |
| | | | | | | | H0663: 1, H0664: 1, H0306: | | |
| | | | | | | | 1, H0459: 1, S0360: 1, | | |
| | | | | | | | L3439: 1, H0580: 1, H0749: | | |
| | | | | | | | 1, S0476: 1, H0770: 1, | | |
| | | | | | | | H0777: 1, H0776: 1, L4995: | | |
| | | | | | | | 1, S0222: 1, H0431: 1, | | |
| | | | | | | | H0409: 1, H0586: 1, H0485: | | |
| | | | | | | | 1, L3655: 1, L0021: 1, | | |
| | | | | | | | H0098: 1, S0049: 1, H0251: | | |
| | | | | | | | 1, H0544: 1, H0546: 1, | | |
| | | | | | | | N0006: 1, H0049: 1, S0050: | | |
| | | | | | | | 1, H0051: 1, S0003: 1, | | |
| | | | | | | | H0622: 1, H0644: 1, H0111: | | |
| | | | | | | | 1, H0169: 1, H0040: 1, | | |
| | | | | | | | H0634: 1, H0551: 1, H0264: | | |
| | | | | | | | 1, H0488: 1, T0069: 1, | | |
| | | | | | | | T0041: 1, L0475: 1, H0641: | | |
| | | | | | | | 1, H0768: 1, H0767: 1, | | |
| | | | | | | | S0142: 1, L0369: 1, L5565: | | |
| | | | | | | | 1, L6421: 1, L0662: 1, | | |
| | | | | | | | L0364: 1, L0794: 1, L0766: | | |
| | | | | | | | 1, L0804: 1, L0375: 1, | | |
| | | | | | | | L0805: 1, L0653: 1, L0776: | | |
| | | | | | | | 1, L0657: 1, L3872: 1, | | |
| | | | | | | | L2655: 1, L2653: 1, L2257: | | |
| | | | | | | | 1, L2264: 1, L5462: 1, | | |
| | | | | | | | L3828: 1, L3210: 1, H0689: | | |
| | | | | | | | 1, H0682: 1, H0659: 1, | | |
| | | | | | | | S0330: 1, H0753: 1, H0521: | | |
| | | | | | | | 1, S0188: 1, S0406: 1, | | |
| | | | | | | | H0555: 1, H0576: 1, S0028: | | |
| | | | | | | | 1, S0032: 1, L3323: 1, | | |
| | | | | | | | L0740: 1, L0747: 1, L0779: | | |
| | | | | | | | 1, L0755: 1, H0445: 1, | | |
| | | | | | | | L2116: 1, H0343: 1, S0434: | | |
| | | | | | | | 1, L0588: 1, S0026: 1, | | |
| | | | | | | | S0196: 1, L3837: 1, H0506: | | |
| | | | | | | | 1, L2854: 1, L2366: 1, | | |
| | | | | | | | L3797: 1 and L0600: 1. | | |
| 124 | HMFHV45 | 1362799 | 134 | 280-624 | 316 | Gln-109 to Pro-114. | L0752: 3, H0009: 2, | | |
| | | | | | | | S0476: 1, H0778: 1, H0549: | | |
| | | | | | | | 1, H0156: 1, H0050: 1, | | |
| | | | | | | | H0633: 1, L0653: 1, L0790: | | |
| | | | | | | | 1, S0292: 1, H0754: 1 and | | |
| | | | | | | | L0605: 1. | | |
| 125 | HECJZ57 | 1365241 | 135 | 182-2056 | 317 | Ser-26 toTrp-37, | S0422: 17, S0436: 11, | 5q23.1-q33.3 | 109690, |
| | | | | | | Lys-70 to Trp-76, | L0754: 8, L2513: 7, H0031: | | 109690, |
| | | | | | | Glu-119 to Gly-125, | 6, L0803: 6, L0774: 6, | | 121050, |
| | | | | | | Gln-140 to Lys-158, | S0358: 5, H0581: 5, L0731: | | 131400, |
| | | | | | | Tyr-172 to Ser-193, | 5, L0591: 5, H0014: 4, | | 137164, |
| | | | | | | Ser-217 to Thr-258, | H0707: 4, L0362: 4, S0444: | | 137164, |
| | | | | | | Thr-268 to Lys-283, | 3, L2477: 3, H0024: 3, | | 137164, |
| | | | | | | Tyr-293 to Val-313, | S0003: 3, L0646: 3, L0794: | | 138040, |
| | | | | | | Pro-318 to Ser-323, | 3, L0659: 3, L0663: 3, | | 138491, |
| | | | | | | Thr-333 to Gly-339, | L0438: 3, S0152: 3, H0521: | | 138491, |
| | | | | | | Ser-367 to Gly-373, | 3, L0748: 3, L0740: 3, | | 138491, |
| | | | | | | Ser-457 to Asp-463, | L0777: 3, L0780: 3, L0759: | | 147061, |
| | | | | | | Leu-473 to Pro-480, | 3, H0543: 3, H0710: 2, | | 147575, |
| | | | | | | Gln-494 to Ser-502, | L3673: 2, S0360: 2, H0580: | | 147575, |
| | | | | | | Gln-508 to Pro-515, | 2, H0747: 2, H0770: 2, | | 147575, |
| | | | | | | Val-610 to Asp-615. | L2744: 2, H0431: 2, H0486: | | 147575, |
| | | | | | | | 2, H0013: 2, H0050: 2, | | 147575, |
| | | | | | | | H0356: 2, S6028: 2, H0328: | | 147683, |
| | | | | | | | 2, H0622: 2, H0553: 2, | | 153455, |
| | | | | | | | H0090: 2, H0591: 2, H0561: | | 161561, |
| | | | | | | | 2, S0438: 2, L0770: 2, | | 164770, |
| | | | | | | | L6421: 2, L0805: 2, L0666: | | 173410, |
| | | | | | | | 2, L0665: 2, L3634: 2, | | 173410, |
| | | | | | | | H0144: 2, S0374: 2, L0565: | | 179095, |
| | | | | | | | 2, H0519: 2, L0743: 2, | | 180071, |
| | | | | | | | L0744: 2, L0439: 2, L0751: | | 181460, |
| | | | | | | | 2, L0749: 2, L0750: 2, | | 192974, |
| | | | | | | | L0608: 2, H0422: 2, H0506: | | 192974, |
| | | | | | | | 2, H0624: 1, H0265: 1, | | 234000, |
| | | | | | | | H0556: 1, S0114: 1, T0049: | | 248310, |
| | | | | | | | 1, H0657: 1, H0656: 1, | | 266100, |
| | | | | | | | L0785: 1, S0001: 1, L0005: | | 272750, |
| | | | | | | | 1, S0356: 1, H0742: 1, | | 600807, |
| | | | | | | | H0741: 1, H0722: 1, H0749: | | 601411, |
| | | | | | | | 1, S0476: 1, H0778: 1, | | 601411, |
| | | | | | | | H0393: 1, H0411: 1, S0222: | | 601596, |
| | | | | | | | 1, H0461: 1, H0415: 1, | | 601692, |
| | | | | | | | H0632: 1, H0485: 1, T0039: | | 601692, |
| | | | | | | | 1, L2638: 1, T0082: 1, | | 601692, |
| | | | | | | | H0590: 1, H0318: 1, S0474: | | 601692, |
| | | | | | | | 1, H0052: 1, H0596: 1, | | 601692, |
| | | | | | | | H0044: 1, H0046: 1, H0083: | | 602089, |
| | | | | | | | 1, H0188: 1, H0288: 1, | | 602121, |
| | | | | | | | H0428: 1, H0039: 1, T0023: | | 602460, |
| | | | | | | | 1, H0644: 1, L0142: 1, | | 603377, |
| | | | | | | | L0455: 1, H0038: 1, H0040: | | 604103, |
| | | | | | | | 1, H0616: 1, H0477: 1, | | 604325, |
| | | | | | | | H0623: 1, H0100: 1, T0041: | | 604443, |
| | | | | | | | 1, H0494: 1, H0560: 1, | | 604443, |
| | | | | | | | H0633: 1, S0002: 1, L0598: | | 605010, |
| | | | | | | | 1, L0771: 1, L6419: 1, | | 605010, |
| | | | | | | | L6415: 1, L0662: 1, L0768: | | 605370, |
| | | | | | | | 1, L0766: 1, L0649: 1, | | 605598, |
| | | | | | | | L0634: 1, L0518: 1, L0531: | | 605845, |
| | | | | | | | 1, L0783: 1, L0383: 1, | | 606263, |
| | | | | | | | L0809: 1, L0664: 1, L2651: | | 606348, |
| | | | | | | | 1, L3391: 1, L2657: 1, | | 606531, |
| | | | | | | | L2655: 1, L2653: 1, L3663: | | 606718, |
| | | | | | | | 1, L5461: 1, H0780: 1, | | 606718, |
| | | | | | | | S0310: 1, H0520: 1, S0126: | | 606718, |
| | | | | | | | 1, S0122: 1, H0683: 1, | | 606718, |
| | | | | | | | H0659: 1, H0648: 1, H0672: | | 606718, |
| | | | | | | | 1, S0378: 1, S0380: 1, | | 606847, |
| | | | | | | | H0754: 1, H0518: 1, H0522: | | 607690, |
| | | | | | | | 1, H0696: 1, H0786: 1, | | 607690, |
| | | | | | | | H0785: 1, H0436: 1, H0478: | | 607690 |
| | | | | | | | 1, H0787: 1, S0027: 1, | | |
| | | | | | | | L0747: 1, L0756: 1, L0752: | | |
| | | | | | | | 1, L0755: 1, S0242: 1, | | |
| | | | | | | | S0194: 1, S0196: 1 and | | |
| | | | | | | | H0542: 1. | | |
| | HECJZ57 | 1365242 | 175 | 3-197 | 357 | Pro-1 to Cys-17, | | | |
| | | | | | | Pro-19 to Val-37. | | | |
| 126 | HEFJW14 | 1362879 | 136 | 622-828 | 318 | Ser-60 to Trp-66. | L0747: 8, L0752: 8, L0761: | 19p13.3 | 108725, |
| | | | | | | | 6, H0593: 5, H0436: 5, | | 109480, |
| | | | | | | | L0777: 5, L0766: 4, L0806: | | 120700, |
| | | | | | | | 4, H0521: 4, L0742: 4, | | 130130, |
| | | | | | | | L0731: 4, L0759: 4, S0356: | | 130130, |
| | | | | | | | 3, H0581: 3, L0770: 3, | | 133171, |
| | | | | | | | L0774: 3, L0805: 3, L0789: | | 136836, |
| | | | | | | | 3, L0745: 3, L0750: 3, | | 145981, |
| | | | | | | | L0600: 3, H0713: 2, H0777: | | 147141, |
| | | | | | | | 2, H0333: 2, H0618: 2, | | 147840, |
| | | | | | | | H0052: 2, H0544: 2, H0546: | | 164953, |
| | | | | | | | 2, H0545: 2, H0457: 2, | | 181800, |
| | | | | | | | H0606: 2, L3905: 2, L0764: | | 188070, |
| | | | | | | | 2, L0775: 2, L0653: 2, | | 277600, |
| | | | | | | | L0776: 2, L0807: 2, L0659: | | 600957, |
| | | | | | | | 2, L0547: 2, L0809: 2, | | 601238, |
| | | | | | | | L0666: 2, H0779: 2, H0539: | | 601240, |
| | | | | | | | 2, H0522: 2, H0786: 2, | | 601768, |
| | | | | | | | L0751: 2, L0780: 2, L0757: | | 601846, |
| | | | | | | | 2, H0543: 2, H0624: 1, | | 602018, |
| | | | | | | | H0695: 1, H0740: 1, H0583: | | 602216, |
| | | | | | | | 1, H0341: 1, H0484: 1, | | 602216, |
| | | | | | | | H0669: 1, H0761: 1, H0306: | | 602216, |
| | | | | | | | 1, H0458: 1, S0418: 1, | | 602477, |
| | | | | | | | S0420: 1, S0444: 1, H0675: | | 605248 |
| | | | | | | | 1, H0676: 1, H0730: 1, | | |
| | | | | | | | H0728: 1, S0045: 1, H0747: | | |
| | | | | | | | 1, L2730: 1, H0550: 1, | | |
| | | | | | | | H0392: 1, H0592: 1, H0586: | | |
| | | | | | | | 1, H0587: 1, H0485: 1, | | |
| | | | | | | | H0635: 1, H0575: 1, H0253: | | |
| | | | | | | | 1, H0318: 1, H0009: 1, | | |
| | | | | | | | H0719: 1, H0688: 1, H0617: | | |
| | | | | | | | 1, H0634: 1, H0087: 1, | | |
| | | | | | | | H0551: 1, H0100: 1, L0351: | | |
| | | | | | | | 1, S0438: 1, H0649: 1, | | |
| | | | | | | | S0002: 1, H0805: 1, L3182: | | |
| | | | | | | | 1, L0763: 1, L0769: 1, | | |
| | | | | | | | L3904: 1, L0773: 1, L7065: | | |
| | | | | | | | 1, L6425: 1, L6423: 1, | | |
| | | | | | | | L0767: 1, L0649: 1, L0803: | | |
| | | | | | | | 1, L0650: 1, L0375: 1, | | |
| | | | | | | | L0657: 1, L0783: 1, L5622: | | |
| | | | | | | | 1, L5623: 1, L4501: 1, | | |
| | | | | | | | L0663: 1, L4772: 1, L3821: | | |
| | | | | | | | 1, L2259: 1, L0710: 1, | | |
| | | | | | | | L2262: 1, L5242: 1, H0781: | | |
| | | | | | | | 1, L0565: 1, H0764: 1, | | |
| | | | | | | | H0783: 1, H0519: 1, S0126: | | |
| | | | | | | | 1, H0689: 1, H0683: 1, | | |
| | | | | | | | H0684: 1, H0659: 1, H0670: | | |
| | | | | | | | 1, H0672: 1, S0330: 1, | | |
| | | | | | | | S0380: 1, H0696: 1, H0134: | | |
| | | | | | | | 1, L0609: 1, S0027: 1, | | |
| | | | | | | | S0028: 1, L0741: 1, L0743: | | |
| | | | | | | | 1, L0439: 1, L0755: 1, | | |
| | | | | | | | S0434: 1, S0436: 1, H0216: | | |
| | | | | | | | 1, H0423: 1, L3355: 1 and | | |
| | | | | | | | H0506: 1. | | |
| 127 | HMFHC03 | 1362672 | 137 | 358-612 | 319 | Phe-24 to Cys-33. | L5622: 16, L0748: 13, | | |
| | | | | | | | H0271: 8, L0770: 8, L0731: | | |
| | | | | | | | 8, L0758: 8, H0734: 7, | | |
| | | | | | | | H0730: 6, H0741: 6, H0574: | | |
| | | | | | | | 6, L0766: 6, L0581: 6, | | |
| | | | | | | | H0717: 5, H0742: 5, H0457: | | |
| | | | | | | | 5, H0014: 5, H0634: 5, | | |
| | | | | | | | S0438: 5, H0521: 5, L0755: | | |
| | | | | | | | 5, H0586: 4, H0587: 4, | | |
| | | | | | | | L3817: 4, H0331: 4, S0344: | | |
| | | | | | | | 4, S0002: 4, L0774: 4, | | |
| | | | | | | | L0749: 4, L0779: 4, L0605: | | |
| | | | | | | | 4, H0713: 3, H0729: 3, | | |
| | | | | | | | H0722: 3, H0728: 3, H0393: | | |
| | | | | | | | 3, H0635: 3, H0427: 3, | | |
| | | | | | | | H0599: 3, H0179: 3, H0591: | | |
| | | | | | | | 3, L0803: 3, L0809: 3, | | |
| | | | | | | | H0786: 3, S0192: 3, H0556: | | |
| | | | | | | | 2, H0727: 2, S0360: 2, | | |
| | | | | | | | H0735: 2, H0733: 2, H0069: | | |
| | | | | | | | 2, S0010: 2, H0050: 2, | | |
| | | | | | | | H0510: 2, H0416: 2, S0214: | | |
| | | | | | | | 2, H0039: 2, L0483: 2, | | |
| | | | | | | | H0031: 2, S0364: 2, H0509: | | |
| | | | | | | | 2, S0142: 2, L0761: 2, | | |
| | | | | | | | L6423: 2, L0775: 2, L0519: | | |
| | | | | | | | 2, S0052: 2, L3641: 2, | | |
| | | | | | | | H0785: 2, H0345: 2, L0439: | | |
| | | | | | | | 2, L0740: 2, L0747: 2, | | |
| | | | | | | | L0756: 2, L0777: 2, S0242: | | |
| | | | | | | | 2, H0721: 1, H0624: 1, | | |
| | | | | | | | H0710: 1, H0685: 1, L0393: | | |
| | | | | | | | 1, H0650: 1, L2914: 1, | | |
| | | | | | | | S0116: 1, H0638: 1, L3646: | | |
| | | | | | | | 1, S0045: 1, H0793: 1, | | |
| | | | | | | | S0476: 1, H0771: 1, H0778: | | |
| | | | | | | | 1, H0619: 1, L2756: 1, | | |
| | | | | | | | L3388: 1, S6022: 1, S0222: | | |
| | | | | | | | 1, T0114: 1, S0280: 1, | | |
| | | | | | | | L0021: 1, H0098: 1, H0575: | | |
| | | | | | | | 1, H0253: 1, S0474: 1, | | |
| | | | | | | | H0581: 1, H0421: 1, H0123: | | |
| | | | | | | | 1, H0049: 1, H0015: 1, | | |
| | | | | | | | H0071: 1, H0375: 1, S6028: | | |
| | | | | | | | 1, L0141: 1, H0644: 1, | | |
| | | | | | | | H0169: 1, S0366: 1, H0598: | | |
| | | | | | | | 1, S0036: 1, H0038: 1, | | |
| | | | | | | | H0040: 1, T0004: 1, H0494: | | |
| | | | | | | | 1, S0015: 1, H0641: 1, | | |
| | | | | | | | H0647: 1, S0210: 1, L0762: | | |
| | | | | | | | 1, L7069: 1, L6418: 1, | | |
| | | | | | | | L6421: 1, L0649: 1, L0806: | | |
| | | | | | | | 1, L0805: 1, L0776: 1, | | |
| | | | | | | | L0527: 1, L0656: 1, L0659: | | |
| | | | | | | | 1, L0526: 1, L0518: 1, | | |
| | | | | | | | L0529: 1, L5623: 1, L0666: | | |
| | | | | | | | 1, L0665: 1, S0428: 1, | | |
| | | | | | | | S0216: 1, L3634: 1, L3635: | | |
| | | | | | | | 1, L3639: 1, L5243: 1, | | |
| | | | | | | | H0144: 1, H0520: 1, S0126: | | |
| | | | | | | | 1, H0659: 1, H0672: 1, | | |
| | | | | | | | S0328: 1, S0378: 1, H0518: | | |
| | | | | | | | 1, L3835: 1, S0146: 1, | | |
| | | | | | | | H0555: 1, L0744: 1, L0780: | | |
| | | | | | | | 1, L0752: 1, L0759: 1, | | |
| | | | | | | | S0260: 1, S0434: 1, L0485: | | |
| | | | | | | | 1, H0668: 1, H0665: 1, | | |
| | | | | | | | S0196: 1, H0542: 1, S0424: | | |
| | | | | | | | 1 and S0456: 1. | | |
| | HMFHC03 | 1365251 | 176 | 366-815 | 358 | | | | |
| | HMFHC03 | 1365250 | 177 | 617-1423 | 359 | Phe-24 to Cys-33, | | | |
| | | | | | | Leu-90 to Thr-96, | | | |
| | | | | | | Met-244 to Leu-262. | | | |
| 128 | HMFHE73 | 1362659 | 138 | 1098-1859 | 320 | Glu-68 to Pro-75. | L0794: 10, L0659: 6, | | |
| | | | | | | | L0809: 5, L0731: 5, S0436: | | |
| | | | | | | | 4, H0716: 3, H0644: 3, | | |
| | | | | | | | L0764: 3, L0601: 3, H0265: | | |
| | | | | | | | 2, H0556: 2, S0410: 2, | | |
| | | | | | | | H0486: 2, H0581: 2, H0251: | | |
| | | | | | | | 2, H0197: 2, H0266: 2, | | |
| | | | | | | | H0617: 2, H0106: 2, H0488: | | |
| | | | | | | | 2, L5623: 2, L0438: 2, | | |
| | | | | | | | S0406: 2, L0439: 2, L0752: | | |
| | | | | | | | 2, T0002: 1, H0717: 1, | | |
| | | | | | | | H0294: 1, S0418: 1, S0356: | | |
| | | | | | | | 1, S0408: 1, H0734: 1, | | |
| | | | | | | | S0132: 1, H0778: 1, H0772: | | |
| | | | | | | | 1, L5038: 1, L5050: 1, | | |
| | | | | | | | H0586: 1, H0559: 1, H0101: | | |
| | | | | | | | 1, H0635: 1, S0474: 1, | | |
| | | | | | | | S0049: 1, H0546: 1, H0545: | | |
| | | | | | | | 1, H0457: 1, T0023: 1, | | |
| | | | | | | | H0135: 1, H0038: 1, H0634: | | |
| | | | | | | | 1, H0264: 1, H0059: 1, | | |
| | | | | | | | H0560: 1, H0745: 1, H0131: | | |
| | | | | | | | 1, H0767: 1, H0538: 1, | | |
| | | | | | | | S0422: 1, S0002: 1, S0426: | | |
| | | | | | | | 1, L0770: 1, L3904: 1, | | |
| | | | | | | | L0761: 1, L0641: 1, L0773: | | |
| | | | | | | | 1, L6412: 1, L6420: 1, | | |
| | | | | | | | L6414: 1, L6418: 1, L6425: | | |
| | | | | | | | 1, L0767: 1, L0803: 1, | | |
| | | | | | | | L0804: 1, L0652: 1, L0807: | | |
| | | | | | | | 1, L0657: 1, L0790: 1, | | |
| | | | | | | | L0791: 1, L6411: 1, L0532: | | |
| | | | | | | | 1, L0663: 1, L0665: 1, | | |
| | | | | | | | L0709: 1, H0783: 1, L3811: | | |
| | | | | | | | 1, H0520: 1, H0547: 1, | | |
| | | | | | | | H0672: 1, H0521: 1, L0744: | | |
| | | | | | | | 1, L0747: 1, L0597: 1, | | |
| | | | | | | | H0667: 1, S0242: 1, S0276: | | |
| | | | | | | | 1, H0543: 1, H0802: 1, | | |
| | | | | | | | H0506: 1 and H0712: 1. | | |
| | HMFHE73 | 1362661 | 178 | 29-1072 | 360 | Glu-68 to Pro-75, | | | |
| | | | | | | Ser-107 to Ala-112, | | | |
| | | | | | | Lys-115 to Gly-121, | | | |
| | | | | | | Ser-158 to Gln-163, | | | |
| | | | | | | Pro-189 to Pro-196, | | | |
| | | | | | | Lys-198 to Ala-206, | | | |
| | | | | | | Gln-235 to Cys-241. | | | |
| 129 | HECKH20 | 1365243 | 139 | 350-754 | 321 | Gln-17 to Phe-28, | S0330: 105, L2643: 61, | 12p13 | 103950, |
| | | | | | | Val-35 to Gly-53, | S0328: 52, L2647: 19, | | 103950, |
| | | | | | | Pro-58 to Arg-100, | L3751: 13, L2614: 10, | | 108600, |
| | | | | | | Phe-119 to Trp-134. | L2650: 10, H0770: 6, | | 110600, |
| | | | | | | | S0464: 6, H0478: 6, L2636: | | 120580, |
| | | | | | | | 2, L3509: 2, S0392: 2, | | 120580, |
| | | | | | | | S0432: 2, L2476: 1, L2627: | | 131440, |
| | | | | | | | 1, L3503: 1, L2637: 1, | | 139130, |
| | | | | | | | L2641: 1, L2644: 1, L3513: | | 154870, |
| | | | | | | | 1, L3752: 1, H0051: 1, | | 176260, |
| | | | | | | | S0352: 1, S0382: 1, S0306: | | 190450, |
| | | | | | | | 1, L0794: 1, L0803: 1, | | 200990, |
| | | | | | | | L0809: 1, L0545: 1, L0790: | | 216950, |
| | | | | | | | 1, L0779: 1, L3377: 1 and | | 600228, |
| | | | | | | | S0446: 1. | | 600618, |
| | | | | | | | | | 602096, |
| | | | | | | | | | 605232, |
| | | | | | | | | | 605257, |
| | | | | | | | | | 606257, |
| | | | | | | | | | 607060 |
| 130 | HMFHH91 | 1365336 | 140 | 517-1176 | 322 | Val-95 to Pro-100, | H0402: 2, L0367: 2, | | |
| | | | | | | Glu-141 to Leu-146, | H0170: 1, H0778: 1, H0521: | | |
| | | | | | | Arg-194 to Gly-201. | 1 and H0436: 1. | | |
| 131 | HMFIH13 | 1348668 | 141 | 652-990 | 323 | Ala-40 to Thr-45. | H0778: 1, S0366: 1 and | | |
| | | | | | | | L3871: 1. | | |
| 132 | HTLRZ23 | 1396796 | 142 | 303-737 | 324 | Ser-41 to Asn-46, | S0422: 106, L0521: 26, | Xq13.3-Xq21.2 | 300039, |
| | | | | | | Ala-62 to Asp-68, | H0170: 16, H0144: 16, | | 300135, |
| | | | | | | Ser-79 to Asp-84. | L0748: 12, H0083: 11, | | 300307, |
| | | | | | | | H0624: 8, L0747: 7, H0171: | | 300390, |
| | | | | | | | 6, L0750: 6, S0474: 5, | | 301835, |
| | | | | | | | T0042: 5, L0794: 5, H0543: | | 305450, |
| | | | | | | | 5, H0581: 4, L0803: 4, | | 309600, |
| | | | | | | | L0529: 4, L0749: 4, S0134: | | 309605, |
| | | | | | | | 3, L3659: 3, H0486: 3, | | 314580 |
| | | | | | | | L0586: 3, H0013: 3, T0041: | | |
| | | | | | | | 3, L0770: 3, L0517: 3, | | |
| | | | | | | | H0659: 3, L0777: 3, L0755: | | |
| | | | | | | | 3, L0589: 3, L0599: 3, | | |
| | | | | | | | H0542: 3, H0802: 3, H0329: | | |
| | | | | | | | 2, H0645: 2, H0393: 2, | | |
| | | | | | | | L3653: 2, H0427: 2, H0052: | | |
| | | | | | | | 2, H0530: 2, S0036: 2, | | |
| | | | | | | | H0591: 2, H0063: 2, L0598: | | |
| | | | | | | | 2, L0662: 2, L0804: 2, | | |
| | | | | | | | L0655: 2, H0519: 2, L0740: | | |
| | | | | | | | 2, L0752: 2, L0759: 2, | | |
| | | | | | | | H0583: 1, S0282: 1, H0306: | | |
| | | | | | | | 1, H0402: 1, H0489: 1, | | |
| | | | | | | | H0580: 1, H0728: 1, H0735: | | |
| | | | | | | | 1, H0151: 1, H0747: 1, | | |
| | | | | | | | H0771: 1, H0778: 1, H0370: | | |
| | | | | | | | 1, H0392: 1, H0497: 1, | | |
| | | | | | | | S0280: 1, S0010: 1, L0105: | | |
| | | | | | | | 1, H0421: 1, H0009: 1, | | |
| | | | | | | | H0569: 1, H0050: 1, H0620: | | |
| | | | | | | | 1, H0354: 1, H0252: 1, | | |
| | | | | | | | H0328: 1, H0428: 1, H0090: | | |
| | | | | | | | 1, H0100: 1, H0202: 1, | | |
| | | | | | | | H0494: 1, L3815: 1, | | |
| | | | | | | | UNKWN: 1, H0529: 1, | | |
| | | | | | | | L0520: 1, L0637: 1, L3904: | | |
| | | | | | | | 1, L0774: 1, L0555: 1, | | |
| | | | | | | | L0606: 1, L0657: 1, L0659: | | |
| | | | | | | | 1, L0809: 1, L0544: 1, | | |
| | | | | | | | L5622: 1, H0520: 1, H0547: | | |
| | | | | | | | 1, H0789: 1, H0436: 1, | | |
| | | | | | | | H0576: 1, L0743: 1, L0744: | | |
| | | | | | | | 1, L0754: 1, L0786: 1, | | |
| | | | | | | | L0731: 1, L0758: 1, S0031: | | |
| | | | | | | | 1, H0595: 1, S0106: 1, | | |
| | | | | | | | H0800: 1 and S0452: 1. | | |
| 133 | HECKK69 | 1387187 | 143 | 21-314 | 325 | Ser-35 to Thr-45. | H0770: 3, H0773: 2, | | |
| | | | | | | | H0781: 2, H0772: 1, H0592: | | |
| | | | | | | | 1, H0081: 1, H0099: 1, | | |
| | | | | | | | S0448: 1, H0767: 1, L0764: | | |
| | | | | | | | 1, L0648: 1, H0780: 1 and | | |
| | | | | | | | S0328: 1. | | |
| | HECKK69 | 1396680 | 179 | 19-312 | 361 | Ser-35 to Thr-45. | | | |
| 134 | HTLRO18 | 1396812 | 144 | 151-630 | 326 | Pro-61 to Asp-67. | H0457: 14, H0749: 8, | | |
| | | | | | | | H0521: 6, H0637: 5, H0747: | | |
| | | | | | | | 5, H0402: 4, H0580: 4, | | |
| | | | | | | | L0731: 4, L0662: 3, L0776: | | |
| | | | | | | | 3, S0052: 3, H0423: 3, | | |
| | | | | | | | H0581: 2, L0748: 2, H0543: | | |
| | | | | | | | 2, H0713: 1, H0664: 1, | | |
| | | | | | | | H0306: 1, H0459: 1, S0358: | | |
| | | | | | | | 1, H0393: 1, H0587: 1, | | |
| | | | | | | | L0021: 1, H0575: 1, H0439: | | |
| | | | | | | | 1, H0050: 1, L0163: 1, | | |
| | | | | | | | L7069: 1, L0648: 1, L0775: | | |
| | | | | | | | 1, L0658: 1, L0809: 1, | | |
| | | | | | | | S0428: 1, S0380: 1, H0576: | | |
| | | | | | | | 1, L0750: 1, L0599: 1, | | |
| | | | | | | | H0800: 1 and L5229: 1. | | |
| 135 | HDPXG11 | 1396714 | 145 | 52-714 | 327 | Ala-29 to Arg-45, | H0521: 37, L0754: 20, | 1q24 | 107300, |
| | | | | | | Cys-135 to Ser-144, | S0436: 14, L0740: 12, | | 131210, |
| | | | | | | Lys-158 to Glu-163, | L0748: 11, H0522: 8, | | 136132, |
| | | | | | | Pro-176 to Asn-186. | S0440: 7, H0641: 7, L0659: | | 164690, |
| | | | | | | | 7, L5622: 7, H0638: 6, | | 173610, |
| | | | | | | | H0580: 6, H0616: 5, L0758: | | 604283, |
| | | | | | | | 5, S0408: 4, S0410: 4, | | 604614, |
| | | | | | | | H0574: 4, H0486: 4, S0474: | | 605205, |
| | | | | | | | 4, S0438: 4, S0344: 4, | | 605429, |
| | | | | | | | L0775: 4, L0664: 4, L2259: | | 605549 |
| | | | | | | | 4, S0126: 4, H0518: 4, | | |
| | | | | | | | L0744: 4, L0757: 4, H0624: | | |
| | | | | | | | 3, H0740: 3, S0376: 3, | | |
| | | | | | | | S0360: 3, H0004: 3, S0003: | | |
| | | | | | | | 3, S0214: 3, H0428: 3, | | |
| | | | | | | | H0622: 3, H0553: 3, H0038: | | |
| | | | | | | | 3, S0002: 3, H0529: 3, | | |
| | | | | | | | L0646: 3, L0771: 3, L0662: | | |
| | | | | | | | 3, L0803: 3, L0805: 3, | | |
| | | | | | | | L0655: 3, H0689: 3, H0658: | | |
| | | | | | | | 3, S0330: 3, L0439: 3, | | |
| | | | | | | | L0747: 3, L0731: 3, L3643: | | |
| | | | | | | | 2, H0717: 2, S0356: 2, | | |
| | | | | | | | S0444: 2, L3646: 2, H0742: | | |
| | | | | | | | 2, H0747: 2, H0599: 2, | | |
| | | | | | | | H0318: 2, H0581: 2, H0457: | | |
| | | | | | | | 2, T0003: 2, H0024: 2, | | |
| | | | | | | | H0179: 2, H0591: 2, H0561: | | |
| | | | | | | | 2, S0142: 2, L0769: 2, | | |
| | | | | | | | L0627: 2, L0521: 2, L0649: | | |
| | | | | | | | 2, L0791: 2, S0374: 2, | | |
| | | | | | | | H0547: 2, H0593: 2, S0152: | | |
| | | | | | | | 2, H0696: 2, H0436: 2, | | |
| | | | | | | | L0751: 2, L0749: 2, L0750: | | |
| | | | | | | | 2, L0752: 2, L0591: 2, | | |
| | | | | | | | L0581: 2, L0593: 2, L0362: | | |
| | | | | | | | 2, H0170: 1, L3644: 1, | | |
| | | | | | | | H0686: 1, H0713: 1, H0583: | | |
| | | | | | | | 1, L0808: 1, L0785: 1, | | |
| | | | | | | | L2906: 1, H0663: 1, S0442: | | |
| | | | | | | | 1, S0358: 1, L3645: 1, | | |
| | | | | | | | H0637: 1, H0730: 1, H0339: | | |
| | | | | | | | 1, S0132: 1, H0393: 1, | | |
| | | | | | | | L3389: 1, L3467: 1, H0411: | | |
| | | | | | | | 1, S0278: 1, S0222: 1, | | |
| | | | | | | | H0601: 1, H0586: 1, H0587: | | |
| | | | | | | | 1, H0331: 1, L2630: 1, | | |
| | | | | | | | L0586: 1, H0013: 1, H0069: | | |
| | | | | | | | 1, H0596: 1, H0545: 1, | | |
| | | | | | | | H0046: 1, H0123: 1, H0057: | | |
| | | | | | | | 1, H0014: 1, H0373: 1, | | |
| | | | | | | | S0051: 1, S0318: 1, S0316: | | |
| | | | | | | | 1, H0328: 1, H0688: 1, | | |
| | | | | | | | H0031: 1, H0032: 1, H0673: | | |
| | | | | | | | 1, H0169: 1, H0674: 1, | | |
| | | | | | | | H0598: 1, H0090: 1, T0069: | | |
| | | | | | | | 1, H0100: 1, T0041: 1, | | |
| | | | | | | | T0042: 1, S0370: 1, H0633: | | |
| | | | | | | | 1, H0646: 1, S0422: 1, | | |
| | | | | | | | S0426: 1, L0369: 1, L0763: | | |
| | | | | | | | 1, L0770: 1, L0638: 1, | | |
| | | | | | | | L0372: 1, L0641: 1, L0644: | | |
| | | | | | | | 1, L0764: 1, L0774: 1, | | |
| | | | | | | | L0376: 1, L0806: 1, L0652: | | |
| | | | | | | | 1, L0653: 1, L0776: 1, | | |
| | | | | | | | L0607: 1, L0527: 1, L0515: | | |
| | | | | | | | 1, L0809: 1, L0666: 1, | | |
| | | | | | | | L0665: 1, S0052: 1, L3391: | | |
| | | | | | | | 1, L2657: 1, L2257: 1, | | |
| | | | | | | | L2260: 1, L2262: 1, L3640: | | |
| | | | | | | | 1, L0438: 1, L0352: 1, | | |
| | | | | | | | L2708: 1, H0520: 1, H0519: | | |
| | | | | | | | 1, L3209: 1, H0690: 1, | | |
| | | | | | | | H0659: 1, H0670: 1, H0660: | | |
| | | | | | | | 1, S0350: 1, S0146: 1, | | |
| | | | | | | | S0406: 1, S3014: 1, S0027: | | |
| | | | | | | | 1, L0756: 1, L0779: 1, | | |
| | | | | | | | L0777: 1, L0759: 1, S0434: | | |
| | | | | | | | 1, L0592: 1, S0026: 1, | | |
| | | | | | | | H0667: 1, S0192: 1, S0242: | | |
| | | | | | | | 1, S0194: 1, S0196: 1, | | |
| | | | | | | | H0542: 1, H0423: 1, H0352: | | |
| | | | | | | | 1 and H0712: 1. | | |
| 136 | HGTMQ07 | 1396731 | 146 | 90-482 | 328 | Ala-59 to Thr-68, | H0620: 7, H0792: 4, | | |
| | | | | | | Glu-72 to Ser-108, | L3659: 3, S0442: 3, H0036: | | |
| | | | | | | Glu-115 to Lys-126. | 3, H0150: 3, S0410: 2, | | |
| | | | | | | | H0722: 2, H0431: 2, H0012: | | |
| | | | | | | | 2, L0774: 2, H0740: 1, | | |
| | | | | | | | H0341: 1, S0358: 1, H0549: | | |
| | | | | | | | 1, H0590: 1, H0746: 1, | | |
| | | | | | | | H0150: 1, H0059: 1, T0042: | | |
| | | | | | | | 1, L0475: 1, L0803: 1, | | |
| | | | | | | | L0775: 1, L6411: 1, H0593: | | |
| | | | | | | | 1, L3215: 1, H0786: 1, | | |
| | | | | | | | H0789: 1, L0758: 1 and | | |
| | | | | | | | H0707: 1. | | |
| 137 | HRDHH73 | 1396790 | 147 | 249-1979 | 329 | Pro-27 to Asp-33, | | | |
| | | | | | | Thr-37 to Glu-42, | | | |
| | | | | | | Thr-64 to Ser-69, | | | |
| | | | | | | Pro-76 to Ala-83, | | | |
| | | | | | | Ser-87 to Pro-100. | | | |
| 138 | HRCSY77 | 1396782 | 148 | 165-434 | 330 | | L0803: 2, H0785: 2, | | |
| | | | | | | | L0768: 1, L0774: 1 and | | |
| | | | | | | | L0806: 1. | | |
| 139 | HKVBG77 | 1396740 | 149 | 93-1565 | 331 | Pro-18 to Gly-30, | H0251: 6, L0803: 4, | | |
| | | | | | | Arg-98 to Cys-103, | L0439: 4, L0794: 3, L0659: | | |
| | | | | | | Glu-106 to Arg-111, | 3, S0206: 3, L0749: 3, | | |
| | | | | | | Ser-117 to Gly-122, | H0624: 2, H0713: 2, H0341: | | |
| | | | | | | Glu-132 to Ala-140, | 2, H0599: 2, H0575: 2, | | |
| | | | | | | Pro-247 to Arg-252, | H0050: 2, H0328: 2, H0413: | | |
| | | | | | | Val-301 to Ala-308, | 2, L0805: 2, L0776: 2, | | |
| | | | | | | Pro-334 to Ser-339, | H0716: 1, H0662: 1, S0356: | | |
| | | | | | | Arg-348 to Thr-354, | 1, S0360: 1, H0733: 1, | | |
| | | | | | | Glu-427 to Gly-439, | H0208: 1, L4925: 1, H0771: | | |
| | | | | | | Gly-442 to Glu-448, | 1, H0772: 1, H0792: 1, | | |
| | | | | | | Ala-457 to Gly-463. | H0586: 1, H0333: 1, H0486: | | |
| | | | | | | | 1, H0618: 1, H0318: 1, | | |
| | | | | | | | H0123: 1, L0471: 1, H0024: | | |
| | | | | | | | 1, T0006: 1, H0644: 1, | | |
| | | | | | | | S0210: 1, L0769: 1, L0638: | | |
| | | | | | | | 1, L7069: 1, L6421: 1, | | |
| | | | | | | | L0648: 1, L0662: 1, L0804: | | |
| | | | | | | | 1, L0375: 1, L0806: 1, | | |
| | | | | | | | L6427: 1, L0783: 1, L0809: | | |
| | | | | | | | 1, L5622: 1, L0789: 1, | | |
| | | | | | | | L0790: 1, H0689: 1, H0539: | | |
| | | | | | | | 1, H0789: 1, S3014: 1, | | |
| | | | | | | | L0744: 1, L0751: 1, L0777: | | |
| | | | | | | | 1, L0780: 1, L0731: 1, | | |
| | | | | | | | H0445: 1 and L2174: 1. | | |
| 140 | HXDCQ39 | 1396804 | 150 | 528-983 | 332 | Phe-85 to Gly-96, | L0509: 9, L0504: 5, L0766: | | |
| | | | | | | Glu-133 to Thr-143. | 5, L0775: 4, L0493: 4, | | |
| | | | | | | | L0515: 3, L0511: 3, L0809: | | |
| | | | | | | | 3, L0747: 3, H0776: 2, | | |
| | | | | | | | L0502: 2, L0770: 2, L0499: | | |
| | | | | | | | 2, L0512: 2, L0751: 2, | | |
| | | | | | | | L0779: 2, L0752: 2, L0731: | | |
| | | | | | | | 2, L0759: 2, L3643: 1, | | |
| | | | | | | | H0294: 1, S0418: 1, S0420: | | |
| | | | | | | | 1, L0005: 1, S0358: 1, | | |
| | | | | | | | S0444: 1, S0045: 1, H0792: | | |
| | | | | | | | 1, H0549: 1, H0438: 1, | | |
| | | | | | | | H0791: 1, H0559: 1, H0486: | | |
| | | | | | | | 1, H0318: 1, S0049: 1, | | |
| | | | | | | | L0471: 1, H0083: 1, S6028: | | |
| | | | | | | | 1, H0090: 1, S0438: 1, | | |
| | | | | | | | S0440: 1, H0509: 1, L4784: | | |
| | | | | | | | 1, L5169: 1, L0506: 1, | | |
| | | | | | | | L0763: 1, L0500: 1, L0772: | | |
| | | | | | | | 1, L6420: 1, L6418: 1, | | |
| | | | | | | | L6425: 1, L0662: 1, L0774: | | |
| | | | | | | | 1, L0510: 1, L0666: 1, | | |
| | | | | | | | L2653: 1, L2263: 1, L5461: | | |
| | | | | | | | 1, L0438: 1, H0689: 1, | | |
| | | | | | | | H0684: 1, H0658: 1, H0670: | | |
| | | | | | | | 1, S0044: 1, H0134: 1, | | |
| | | | | | | | L0748: 1, L0439: 1, L0740: | | |
| | | | | | | | 1, L0749: 1, L0755: 1, | | |
| | | | | | | | S0434: 1, S0436: 1, L0593: | | |
| | | | | | | | 1 and H0423: 1. | | |
| 141 | HECHZ42 | 1396662 | 151 | 37-1062 | 333 | Glu-57 to Leu-65, | H0770: 4, H0031: 4, | | |
| | | | | | | Ser-69 to Arg-74, | L2308: 3, L2519: 2, S0430: | | |
| | | | | | | Gln-125 to Gln-135, | 1, H0656: 1, L3044: 1, | | |
| | | | | | | Gln-161 to Arg-167. | H0586: 1, L1733: 1, L1877: | | |
| | | | | | | | 1, L2543: 1, H0081: 1, | | |
| | | | | | | | S0388: 1, H0616: 1, H0264: | | |
| | | | | | | | 1, H0488: 1, H0494: 1, | | |
| | | | | | | | H0773: 1, L5623: 1, H0779: | | |
| | | | | | | | 1, S0328: 1 and L0366: 1. | | |
| 142 | HGTJD50 | 1396720 | 152 | 180-1112 | 334 | Ala-32 to Asn-37, | S0408: 6, L0803: 5, S0442: | | |
| | | | | | | Ala-89 to Glu-101, | 3, H0792: 3, L0748: 3, | | |
| | | | | | | Gly-116 to Pro-126. | S0354: 2, S0444: 2, H0059: | | |
| | | | | | | | 2, H0742: 1, H0730: 1, | | |
| | | | | | | | H0036: 1, H0246: 1, S0374: | | |
| | | | | | | | 1, H0774: 1, S0406: 1, | | |
| | | | | | | | L0749: 1 and S0436: 1. | | |
| 143 | HEDDB56 | 1376996 | 153 | 44-403 | 335 | Gly-31 to Lys-53, | H0771: 2 | | |
| | | | | | | Pro-71 to Cys-77, | | | |
| | | | | | | His-79 to Cys-103. | | | |
| | HEDDB56 | 1396691 | 180 | 42-401 | 362 | Gly-31 to Lys-53, | | | |
| | | | | | | Pro-71 to Cys-77, | | | |
| | | | | | | His-79 to Cys-103. | | | |
| 144 | HECHS69 | 1387369 | 154 | 21-764 | 336 | Gly-76 to Leu-83, | H0494: 7, H0586: 5, | | |
| | | | | | | Ala-108 to Glu-113, | S0330: 5, H0770: 3, H0772: | | |
| | | | | | | Ala-126 to Lys-132, | 3, H0781: 3, H0602: 2, | | |
| | | | | | | Gly-145 to Leu-151, | H0587: 2, L0806: 2, L0747: | | |
| | | | | | | Gln-161 to Val-166, | 2, H0081: 1, S0250: 1, | | |
| | | | | | | Ala-180 to Gln-185, | H0708: 1, L0648: 1, L0376: | | |
| | | | | | | Gly-190 to Ala-198, | 1, L5623: 1, H0780: 1, | | |
| | | | | | | Asn-203 to Gly-216. | S0328: 1, H0521: 1 and | | |
| | | | | | | | S3014: 1. | | |
| | HECHS69 | 1396704 | 181 | 19-642 | 363 | Gly-76 to Leu-83, | | | |
| | | | | | | Ala-108 to Glu-113, | | | |
| | | | | | | Ala-126 to Lys-132, | | | |
| | | | | | | Gly-145 to Leu-151, | | | |
| | | | | | | Gln-161 to Val-166, | | | |
| | | | | | | Ala-180 to Gln-185, | | | |
| | | | | | | Gly-190 to Ala-198, | | | |
| | | | | | | Asn-203 to Ser-208. | | | |
| 145 | HEFIA60 | 1379056 | 155 | 281-541 | 337 | | H0776: 1 | | |
| | HEFIA60 | 1396694 | 182 | 279-512 | 364 | | | | |
| | HEFIA60 | 1394281 | 183 | 285-545 | 365 | | | | |
| 146 | HEFIF14 | 1392273 | 156 | 38-442 | 338 | Pro-63 to Val-72, | L0779: 3, S0360: 2, | | |
| | | | | | | Ala-76 to Arg-85. | H0619: 2, H0545: 2, L0771: | | |
| | | | | | | | 2, L0754: 2, H0170: 1, | | |
| | | | | | | | S0040: 1, H0341: 1, S0358: | | |
| | | | | | | | 1, H0776: 1, L3863: 1, | | |
| | | | | | | | H0201: 1, S0364: 1, L0640: | | |
| | | | | | | | 1, L0770: 1, L0796: 1, | | |
| | | | | | | | L0772: 1, L0645: 1, L6417: | | |
| | | | | | | | 1, L6421: 1, L0662: 1, | | |
| | | | | | | | L0774: 1, L0776: 1, L0659: | | |
| | | | | | | | 1, L0783: 1, L0528: 1, | | |
| | | | | | | | L0530: 1, L0664: 1, H0693: | | |
| | | | | | | | 1, S0406: 1, L0748: 1, | | |
| | | | | | | | L0752: 1, L0758: 1 and | | |
| | | | | | | | S0026: 1. | | |
| | HEFIF14 | 1396708 | 184 | 558-581 | 366 | | | | |
| 147 | HEDCP16 | 1396690 | 157 | 42-401 | 339 | Gly-31 to Lys-53, | H0771: 2 | | |
| | | | | | | Pro-71 to Cys-77, | | | |
| | | | | | | His-79 to Cys-103. | | | |
| 148 | HEDEX64 | 1384784 | 158 | 177-449 | 340 | Met-1 to Met-6, | L0809: 10, H0696: 2, | | |
| | | | | | | Pro-10 to Pro-15, | H0771: 1, L0761: 1, L0800: | | |
| | | | | | | Pro-49 to Val-56, | 1, L0521: 1, L0788: 1 and | | |
| | | | | | | Pro-59 to Ser-64, | S0052: 1. | | |
| | | | | | | His-66 to Lys-73. | | | |
| | HEDEX64 | 1396693 | 185 | 157-429 | 367 | Met-1 to Met-6, | | | |
| | | | | | | Pro-10 to Pro-15, | | | |
| | | | | | | Pro-49 to Val-56, | | | |
| | | | | | | Pro-59 to Ser-64, | | | |
| | | | | | | His-66 to Lys-73, | | | |
| | | | | | | Val-75 to Lys-81. | | | |
| | HEDEX64 | 1396692 | 186 | 175-447 | 368 | Met-1 to Met-6, | | | |
| | | | | | | Pro-10 to Pro-15, | | | |
| | | | | | | Pro-49 to Val-56, | | | |
| | | | | | | Pro-59 to Ser-64, | | | |
| | | | | | | His-66 to Lys-73. | | | |
| 149 | HDPAV18 | 1396658 | 159 | 124-687 | 341 | Glu-6 to Ser-11, | S0408: 6, S0410: 4, H0521: | | |
| | | | | | | Ser-168 to Gly-181. | 4, L5010: 3, S0278: 3, | | |
| | | | | | | | H0083: 3, H0435: 3, S0436: | | |
| | | | | | | | 3, H0624: 2, H0265: 2, | | |
| | | | | | | | H0556: 2, H0650: 2, S0418: | | |
| | | | | | | | 2, S0045: 2, H0550: 2, | | |
| | | | | | | | H0486: 2, H0706: 2, H0052: | | |
| | | | | | | | 2, L3905: 2, L0603: 2, | | |
| | | | | | | | H0542: 2, H0159: 1, H0695: | | |
| | | | | | | | 1, S0342: 1, H0717: 1, | | |
| | | | | | | | L2893: 1, H0657: 1, H0692: | | |
| | | | | | | | 1, S0356: 1, S0442: 1, | | |
| | | | | | | | S0444: 1, S0046: 1, H0749: | | |
| | | | | | | | 1, L2771: 1, H0261: 1, | | |
| | | | | | | | H0370: 1, H0635: 1, S0280: | | |
| | | | | | | | 1, H0036: 1, H0267: 1, | | |
| | | | | | | | H0213: 1, H0617: 1, H0189: | | |
| | | | | | | | 1, H0135: 1, H0090: 1, | | |
| | | | | | | | H0040: 1, H0063: 1, H0264: | | |
| | | | | | | | 1, H0059: 1, T0042: 1, | | |
| | | | | | | | H0494: 1, L0803: 1, L5622: | | |
| | | | | | | | 1, L2265: 1, L5241: 1, | | |
| | | | | | | | H0765: 1, S0126: 1, H0689: | | |
| | | | | | | | 1, H0658: 1, H0539: 1, | | |
| | | | | | | | H0754: 1, H0522: 1, H0134: | | |
| | | | | | | | 1, S0037: 1, S0032: 1, | | |
| | | | | | | | L0748: 1, S0260: 1, L0581: | | |
| | | | | | | | 1, S0026: 1, S0192: 1 and | | |
| | | | | | | | H0423: 1. | | |
| | HDPAV18 | 1329314 | 187 | 108-305 | 369 | | | | |
| 150 | HECKQ42 | 1374269 | 160 | 22-315 | 342 | Ser-35 to Thr-45. | H0770: 3, H0773: 2, | | |
| | | | | | | | H0781: 2, H0772: 1, H0592: | | |
| | | | | | | | 1, H0081: 1, H0099: 1, | | |
| | | | | | | | S0448: 1, H0767: 1, L0764: | | |
| | | | | | | | 1, L0648: 1, H0780: 1 and | | |
| | | | | | | | S0328: 1. | | |
| | HECKQ42 | 1386993 | 188 | 7-300 | 370 | Ser-35 to Thr-45. | | | |
| | HECKQ42 | 1379289 | 189 | 22-315 | 371 | Ser-35 to Thr-45. | | | |
| 151 | HGTLT88 | 1396738 | 161 | 540-809 | 343 | Ala-49 to Gly-59, | L0803: 3, L0805: 3, L0749: | | |
| | | | | | | Ala-78 to Ile-83. | 3, H0083: 2, H0424: 2, | | |
| | | | | | | | L0743: 2, L0777: 2, H0656: | | |
| | | | | | | | 1, H0794: 1, H0792: 1, | | |
| | | | | | | | S6016: 1, H0052: 1, H0263: | | |
| | | | | | | | 1, H0620: 1, H0488: 1, | | |
| | | | | | | | L0369: 1, L0500: 1, L0769: | | |
| | | | | | | | 1, L0764: 1, L0771: 1, | | |
| | | | | | | | L0773: 1, L0662: 1, L0768: | | |
| | | | | | | | 1, L0794: 1, L0774: 1, | | |
| | | | | | | | L0657: 1, L0659: 1, L0809: | | |
| | | | | | | | 1, L0789: 1, L0666: 1, | | |
| | | | | | | | L0664: 1, L3841: 1, H0547: | | |
| | | | | | | | 1, L0748: 1, L0740: 1, | | |
| | | | | | | | L0747: 1, L0750: 1, L0780: | | |
| | | | | | | | 1, L0758: 1, L0759: 1, | | |
| | | | | | | | S0436: 1 and H0668: 1. | | |
| | HGTLT88 | 1382473 | 190 | 129-320 | 372 | Arg-22 to Ser-32. | | | |
| 152 | HRCSG16 | 1396779 | 162 | 245-517 | 344 | Arg-22 to Pro-28, | H0785: 2 | | |
| | | | | | | Glu-64 to Gly-72, | | | |
| | | | | | | Ile-74 to Glu-83. | | | |
| 153 | HQQBQ63 | 1396759 | 163 | 228-809 | 345 | Ser-107 to Gln-115, | H0457: 4, H0749: 3, | | |
| | | | | | | Arg-156 to Asp-162. | L0766: 3, L0771: 2, L0794: | | |
| | | | | | | | 2, L0789: 2, H0707: 2, | | |
| | | | | | | | H0556: 1, H0656: 1, H0747: | | |
| | | | | | | | 1, H0792: 1, H0486: 1, | | |
| | | | | | | | H0009: 1, L0646: 1, L0768: | | |
| | | | | | | | 1, L0655: 1, L0809: 1, | | |
| | | | | | | | H0701: 1, L0747: 1, L0758: | | |
| | | | | | | | 1 and H0542: 1. | | |
| 154 | HRDIJ66 | 1396797 | 164 | 108-1115 | 346 | Glu-113 to Lys-118, | L0794: 4, L0758: 4, S0408: | | |
| | | | | | | Lys-172 to Ser-177, | 2, S0356: 1, L2497: 1, | | |
| | | | | | | Ser-204 to Leu-209, | H0120: 1, H0014: 1, H0510: | | |
| | | | | | | Tyr-289 to Glu-294, | 1, S0250: 1, S0003: 1, | | |
| | | | | | | Thr-304 to Leu-314, | H0328: 1, S0438: 1, L0766: | | |
| | | | | | | Trp-329 to Asp-335. | 1, L0803: 1, L0774: 1, | | |
| | | | | | | | L5623: 1, H0648: 1, S0330: | | |
| | | | | | | | 1, H0786: 1 and L0485: 1. | | |
| 155 | HRDKC71 | 1396815 | 165 | 23-652 | 347 | Ser-40 to Ser-49, | L0769: 6, L0748: 6, L0731: | | |
| | | | | | | Pro-73 to Arg-78, | 5, H0617: 4, S0358: 3, | | |
| | | | | | | Arg-108 to Thr-113, | H0266: 3, H0031: 3, L0770: | | |
| | | | | | | Glu-166 to Trp-171, | 3, L0774: 3, H0753: 3, | | |
| | | | | | | Arg-179 to Arg-188. | H0341: 2, H0545: 2, S0344: | | |
| | | | | | | | 2, L3815: 2, L0520: 2, | | |
| | | | | | | | L0766: 2, L0776: 2, H0696: | | |
| | | | | | | | 2, S0406: 2, S0027: 2, | | |
| | | | | | | | L0751: 2, L0757: 2, L0758: | | |
| | | | | | | | 2, H0171: 1, S0114: 1, | | |
| | | | | | | | S0134: 1, H0657: 1, H0803: | | |
| | | | | | | | 1, S0442: 1, S0408: 1, | | |
| | | | | | | | S0410: 1, L3649: 1, H0637: | | |
| | | | | | | | 1, H0771: 1, H0640: 1, | | |
| | | | | | | | H0592: 1, H0333: 1, L2491: | | |
| | | | | | | | 1, L2504: 1, H0575: 1, | | |
| | | | | | | | H0590: 1, H0052: 1, H0563: | | |
| | | | | | | | 1, H0123: 1, H0428: 1, | | |
| | | | | | | | H0040: 1, H0413: 1, S0422: | | |
| | | | | | | | 1, L3135: 1, H0529: 1, | | |
| | | | | | | | L0772: 1, L0646: 1, L0764: | | |
| | | | | | | | 1, L0773: 1, L0768: 1, | | |
| | | | | | | | L0794: 1, L0381: 1, L0775: | | |
| | | | | | | | 1, L0659: 1, L0783: 1, | | |
| | | | | | | | L0787: 1, L0665: 1, L3871: | | |
| | | | | | | | 1, L3635: 1, H0764: 1, | | |
| | | | | | | | L2708: 1, H0711: 1, H0659: | | |
| | | | | | | | 1, H0658: 1, H0786: 1, | | |
| | | | | | | | H0785: 1, H0626: 1, S3014: | | |
| | | | | | | | 1, L0743: 1, L0745: 1, | | |
| | | | | | | | L0747: 1, L0750: 1, L0779: | | |
| | | | | | | | 1, L0780: 1, L0753: 1, | | |
| | | | | | | | L0755: 1, L0759: 1, S0026: | | |
| | | | | | | | 1, H0653: 1, H0667: 1 and | | |
| | | | | | | | H0136: 1. | | |
| 156 | HQQDK22 | 1396814 | 166 | 273-1007 | 348 | Ser-107 to Gln-115, | | | |
| | | | | | | Arg-156 to Asp-162, | | | |
| | | | | | | Gln-222 to Ala-230, | | | |
| | | | | | | Ser-238 to Gln-244. | | | |
| 157 | HCBOG68 | 1243856 | 167 | 31-486 | 349 | Trp-35 to Trp-45, | S0410: 24, S0408: 6, | | |
| | | | | | | Pro-52 to Asp-57, | H0792: 5, S0444: 4, S0406: | | |
| | | | | | | Thr-73 to Arg-82, | 4, L0748: 4, H0661: 3, | | |
| | | | | | | Pro-105 to Leu-112, | S0358: 3, H0393: 3, H0574: | | |
| | | | | | | Pro-115 to Arg-127, | 3, S0438: 3, S0440: 3, | | |
| | | | | | | Pro-140 to Gln-151. | L0764: 3, S0442: 2, S0360: | | |
| | | | | | | | 2, H0742: 2, H0509: 2, | | |
| | | | | | | | S0374: 2, H0730: 1, H0722: | | |
| | | | | | | | 1, H0776: 1, H0331: 1, | | |
| | | | | | | | H0204: 1, H0150: 1, H0510: | | |
| | | | | | | | 1, H0615: 1, H0059: 1, | | |
| | | | | | | | L0772: 1, L0803: 1, L0774: | | |
| | | | | | | | 1, L0791: 1 and H0774: 1. | | |
| | HCBOG68 | 1449936 | 191 | 112-540 | 373 | Trp-35 to Trp-45, | | | |
| | | | | | | Pro-52 to Asp-57, | | | |
| | | | | | | Thr-73 to Thr-80, | | | |
| | | | | | | Pro-96 to Leu-103, | | | |
| | | | | | | Pro-106 to Arg-118, | | | |
| | | | | | | Pro-131 to Gln-142. | | | |
| | HCBOG68 | 1449935 | 192 | 38-493 | 374 | Trp-35 to Trp-45, | | | |
| | | | | | | Pro-52 to Asp-57, | | | |
| | | | | | | Thr-73 to Arg-82, | | | |
| | | | | | | Pro-105 to Leu-112, | | | |
| | | | | | | Pro-115 to Arg-127, | | | |
| | | | | | | Pro-140 to Gln-151. | | | |

Description of Table 1D

[1021] The polynucleotides or polypeptides, or agonists or antagonists of the present invention can be used in assays to test for one or more biological activities. If these polynucleotides and polypeptides do exhibit activity in a particular assay, it is likely that these molecules may be involved in the diseases associated with the biological activity. Thus, the polynucleotides or polypeptides, or agonists or antagonists could be used to treat the associated disease.

[1022] In preferred embodiments, the present invention encompasses a method of detecting, preventing, treating, and/or ameliorating a disease or disorder listed as listed in the “Preferred Indications” column of Tables 1D and 1E (below); comprising administering to a patient (in which such detection, prevention, treatment, and/or amelioration is desired) a protein, nucleic acid, or antibody of the invention (or fragment or variant thereof) represented by Table 1A and Table 1D (in the same row as the disease or disorder to be treated is listed in the “Preferred Indications” column of Table 1D) in an amount effective to detect, prevent, treat, or ameliorate the disease or disorder.

[1023] As indicated in Table 1D, the polynucleotides, polypeptides, agonists, or antagonists of the present invention (including antibodies) can be used in assays to test for one or more biological activities. If these polynucleotides and polypeptides do exhibit activity in a particular assay, it is likely that these molecules may be involved in the diseases associated with the biological activity. Thus, the polynucleotides or polypeptides, or agonists or antagonists thereof (including antibodies) could be used to prevent, treat, or ameliorate the associated disease.

[1024] The present invention encompasses methods of detecting, preventing, diagnosing, prognosticating, treating, and/or ameliorating a disease or disorder. In preferred embodiments, the present invention encompasses a method of detecting, diagnosing, treating, preventing, or ameliorating a disease or disorder listed in the “Preferred Indications” column of Table 1D; comprising administering to a patient in which such treatment, prevention, or amelioration is desired a protein, nucleic acid, or antibody of the invention (or fragment or variant thereof) in an amount effective to treat, prevent, or ameliorate the disease or disorder. The first and second columns of Table 1D show the “Gene No.” and “cDNA Clone ID No.”, respectively, indicating certain nucleic acids and proteins (or antibodies against the same) of the invention (including polynucleotide, polypeptide, and antibody fragments or variants thereof) that may be used in detecting, preventing, diagnosing, prognosticating, treating, and/or ameliorating the disease(s) or disorder(s) indicated in the corresponding row in Column 3 of Table 1D.

[1025] In another embodiment, the present invention also encompasses methods of preventing, treating, diagnosing, or ameliorating a disease or disorder listed in the “Preferred Indications” column of Table 1D; comprising administering to a patient combinations of the proteins, nucleic acids, or antibodies of the invention (or fragments or variants thereof), sharing similar indications as shown in the corresponding rows in Column 3 of Table 1D.

[1026] The “Preferred Indication” column describes diseases, disorders, and/or conditions that may be treated, prevented, diagnosed, or ameliorated by a protein, nucleic acid, or antibody of the invention (or fragment or variant thereof).

[1027] The recitation of “Cancer” in the “Preferred Indication” column indicates that the corresponding nucleic acid and protein, or antibody against the same, of the invention (or fragment or variant thereof) may be used for example, to diagnose, treat, prevent, and/or ameliorate diseases and/or disorders relating to neoplastic diseases (e.g., leukemias, cancers, and/or as described below under “Hyperproliferative Disorders”).

[1028] In specific embodiments, a protein, nucleic acid, or antibody of the invention (or fragment or variant thereof) having a “Cancer” recitation in the “Preferred Indication” column of Table 1D may be used for example, to diagnose, treat, prevent, and/or ameliorate a neoplasm located in a tissue selected from the group consisting of: colon, abdomen, bone, breast, digestive system, liver, pancreas, prostate, peritoneum, lung, blood (e.g., leukemia), endocrine glands (adrenal, parathyroid, pituitary, testicles, ovary, thymus, thyroid), uterus, eye, head and neck, nervous (central and peripheral), lymphatic system, pelvic, skin, soft tissue, spleen, thoracic, and urogenital.

[1029] In specific embodiments, a protein, nucleic acid, or antibody of the invention (or fragment or variant thereof) having a “Cancer” recitation in the “Preferred Indication” column of Table 1D, may be used for example, to diagnose, treat, prevent, and/or ameliorate a pre-neoplastic condition, selected from the group consisting of: hyperplasia (e.g., endometrial hyperplasia and/or as described in the section entitled “Hyperproliferative Disorders”), metaplasia (e.g., connective tissue metaplasia, atypical metaplasia, and/or as described in the section entitled “Hyperproliferative Disorders”), and/or dysplasia (e.g., cervical dysplasia, and bronchopulmonary dysplasia).

[1030] In another specific embodiment, a protein, nucleic acid, or antibody of the invention (or fragment or variant thereof) having a “Cancer” recitation in the “Preferred Indication” column of Table 1D, may be used for example, to diagnose, treat, prevent, and/or ameliorate a benign dysproliferative disorder selected from the group consisting of: benign tumors, fibrocystic conditions, tissue hypertrophy, and/or as described in the section entitled “Hyperproliferative Disorders”.

[1031] The recitation of “Immune/Hematopoietic” in the “Preferred Indication” column indicates that the corresponding nucleic acid and protein, or antibody against the same, of the invention (or fragment or variant thereof), may be used for example, to diagnose, treat, prevent, and/or ameliorate diseases and/or disorders relating to neoplastic diseases (e.g., as described below under “Hyperproliferative Disorders”), blood disorders (e.g., as described below under “Immune Activity” “Cardiovascular Disorders” and/or “Blood-Related Disorders”), and infections (e.g., as described below under “Infectious Disease”).

[1032] In specific embodiments, a protein, nucleic acid, or antibody of the invention (or fragment or variant thereof) having the “Immune/Hematopoietic” recitation in the “Preferred Indication” column of Table 1D, may be used for example, to diagnose, treat, prevent, and/or ameliorate a disease or disorder selected from the group consisting of: anemia, pancytopenia, leukopenia, thrombocytopenia, leukemias, Hodgkin's disease, non-Hodgkin's lymphoma, acute lymphocytic anemia (ALL), plasmacytomas, multiple myeloma, Burkitt's lymphoma, arthritis, asthma, AIDS, autoimmune disease, rheumatoid arthritis, granulomatous disease, immune deficiency, inflammatory bowel disease, sepsis, neutropenia, neutrophilia, psoriasis, immune reactions to transplanted organs and tissues, systemic lupus erythematosis, hemophilia, hypercoagulation, diabetes mellitus, endocarditis, meningitis, Lyme Disease, and allergies.

[1033] The recitation of “Reproductive” in the “Preferred Indication” column indicates that the corresponding nucleic acid and protein, or antibody against the same, of the invention (or fragment or variant thereof), may be used for example, to diagnose, treat, prevent, and/or ameliorate diseases and/or disorders relating to neoplastic diseases (e.g., as described below under “Hyperproliferative Disorders”), and disorders of the reproductive system (e.g., as described below under “Reproductive System Disorders”).

[1034] In specific embodiments, a protein, nucleic acid, or antibody of the invention (or fragment or variant thereof) having a “Reproductive” recitation in the “Preferred Indication” column of Table 1D, may be used for example, to diagnose, treat, prevent, and/or ameliorate a disease or disorder selected from the group consisting of: cryptorchism, prostatitis, inguinal hernia, varicocele, leydig cell tumors, verrucous carcinoma, prostatitis, malacoplakia, Peyronie's disease, penile carcinoma, squamous cell hyperplasia, dysmenorrhea, ovarian adenocarcinoma, Turner's syndrome, mucopurulent cervicitis, Sertoli-leydig tumors, ovarian cancer, uterine cancer, pelvic inflammatory disease, testicular cancer, prostate cancer, Klinefelter's syndrome, Young's syndrome, premature ejaculation, diabetes mellitus, cystic fibrosis, Kartagener's syndrome, testicular atrophy, testicular feminization, anorchia, ectopic testis, epididymitis, orchitis, gonorrhea, syphilis, testicular torsion, vasitis nodosa, germ cell tumors, stromal tumors, dysmenorrhea, retroverted uterus, endometriosis, fibroids, adenomyosis, anovulatory bleeding, amenorrhea, Cushing's syndrome, hydatidiform moles, Asherman's syndrome, premature menopause, precocious puberty, uterine polyps, dysfunctional uterine bleeding, cervicitis, chronic cervicitis, mucopurulent cervicitis, cervical dysplasia, cervical polyps, Nabothian cysts, cervical erosion, cervical incompetence, cervical neoplasms, pseudohermaphroditism, and premenstrual syndrome.

[1035] The recitation of “Musculoskeletal” in the “Preferred Indication” column indicates that the corresponding nucleic acid and protein, or antibody against the same, of the invention (or fragment or variant thereof), may be used for example, to diagnose, treat, prevent, and/or ameliorate diseases and/or disorders relating to neoplastic diseases (e.g., as described below under “Hyperproliferative Disorders”), and disorders of the immune system (e.g., as described below under “Immune Activity”).

[1036] In specific embodiments, a protein, nucleic acid, or antibody of the invention (or fragment or variant thereof) having a “Musculoskeletal” recitation in the “Preferred Indication” column of Table 1D, may be used for example, to diagnose, treat, prevent, and/or ameliorate a disease or disorder selected from the group consisting of: bone cancers (e.g., osteochondromas, benign chondromas, chondroblastoma, chondromyxoid fibromas, osteoid osteomas, giant cell tumors, multiple myeloma, osteosarcomas), Paget's Disease, rheumatoid arthritis, systemic lupus erythematosus, osteomyelitis, Lyme Disease, gout, bursitis, tendonitis, osteoporosis, osteoarthritis, muscular dystrophy, mitochondrial myopathy, cachexia, and multiple sclerosis.

[1037] The recitation of “Cardiovascular” in the “Preferred Indication” column indicates that the corresponding nucleic acid and protein, or antibody against the same, of the invention (or fragment or variant thereof), may be used for example, to diagnose, treat, prevent, and/or ameliorate diseases and/or disorders relating to neoplastic diseases (e.g., as described below under “Hyperproliferative Disorders”), and disorders of the cardiovascular system (e.g., as described below under “Cardiovascular Disorders”).

[1038] In specific embodiments, a protein, nucleic acid, or antibody of the invention (or fragment or variant thereof) having a “Cardiovascular” recitation in the “Preferred Indication” column of Table 1D, may be used for example, to diagnose, treat, prevent, and/or ameliorate a disease or disorder selected from the group consisting of: myxomas, fibromas, rhabdomyomas, cardiovascular abnormalities (e.g., congenital heart defects, cerebral arteriovenous malformations, septal defects), heart disease (e.g., heart failure, congestive heart disease, arrhythmia, tachycardia, fibrillation, pericardial Disease, endocarditis), cardiac arrest, heart valve disease (e.g., stenosis, regurgitation, prolapse), vascular disease (e.g., hypertension, coronary artery disease, angina, aneurysm, arteriosclerosis, peripheral vascular disease), hyponatremia, hypematremia, hypokalemia, and hyperkalemia.

[1039] The recitation of “Mixed Fetal” in the “Preferred Indication” column indicates that the corresponding nucleic acid and protein, or antibody against the same, of the invention (or fragment or variant thereof), may be used for example, to diagnose, treat, prevent, and/or ameliorate diseases and/or disorders relating to neoplastic diseases (e.g., as described below under “Hyperproliferative Disorders”).

[1040] In specific embodiments, a protein, nucleic acid, or antibody of the invention (or fragment or variant thereof) having a “Mixed Fetal” recitation in the “Preferred Indication” column of Table 1D, may be used for example, to diagnose, treat, prevent, and/or ameliorate a disease or disorder selected from the group consisting of: spina bifida, hydranencephaly, neurofibromatosis, fetal alcohol syndrome, diabetes mellitus, PKU, Down's syndrome, Patau syndrome, Edwards syndrome, Turner syndrome, Apert syndrome, Carpenter syndrome, Conradi syndrome, Crouzon syndrome, cutis laxa, Cornelia de Lange syndrome, Ellis-van Creveld syndrome, Holt-Oram syndrome, Kartagener syndrome, Meckel-Gruber syndrome, Noonan syndrome, Pallister-Hall syndrome, Rubinstein-Taybi syndrome, Scimitar syndrome, Smith-Lemli-Opitz syndrome, thromocytopenia-absent radius (TAR) syndrome, Treacher Collins syndrome, Williams syndrome, Hirschsprung's disease, Meckel's diverticulum, polycystic kidney disease, Turner's syndrome, and gonadal dysgenesis, Klippel-Feil syndrome, Ostogenesis imperfecta, muscular dystrophy, Tay-Sachs disease, Wilm's tumor, neuroblastoma, and retinoblastoma.

[1041] The recitation of “Excretory” in the “Preferred Indication” column indicates that the corresponding nucleic acid and protein, or antibody against the same, of the invention (or fragment or variant thereof), may be used for example, to diagnose, treat, prevent, and/or ameliorate diseases and/or disorders relating to neoplastic diseases (e.g., as described below under “Hyperproliferative Disorders”) and renal disorders (e.g., as described below under “Renal Disorders”).

[1042] In specific embodiments, a protein, nucleic acid, or antibody of the invention (or fragment or variant thereof) having a “Excretory” recitation in the “Preferred Indication” column of Table 1D, may be used for example, to diagnose, treat, prevent, and/or ameliorate a disease or disorder selected from the group consisting of: bladder cancer, prostate cancer, benign prostatic hyperplasia, bladder disorders (e.g., urinary incontinence, urinary retention, urinary obstruction, urinary tract Infections, interstitial cystitis, prostatitis, neurogenic bladder, hematuria), renal disorders (e.g., hydronephrosis, proteinuria, renal failure, pyelonephritis, urolithiasis, reflux nephropathy, and unilateral obstructive uropathy).

[1043] The recitation of “Neural/Sensory” in the “Preferred Indication” column indicates that the corresponding nucleic acid and protein, or antibody against the same, of the invention (or fragment or variant thereof), may be used for example, to diagnose, treat, prevent, and/or ameliorate diseases and/or disorders relating to neoplastic diseases (e.g., as described below under “Hyperproliferative Disorders”) and diseases or disorders of the nervous system (e.g., as described below under “Neural Activity and Neurological Diseases”).

[1044] In specific embodiments, a protein, nucleic acid, or antibody of the invention (or fragment or variant thereof) having a “Neural/Sensory” recitation in the “Preferred Indication” column of Table 1D, may be used for example, to diagnose, treat, prevent, and/or ameliorate a disease or disorder selected from the group consisting of: brain cancer (e.g., brain stem glioma, brain tumors, central nervous system (Primary) lymphoma, central nervous system lymphoma, cerebellar astrocytoma, and cerebral astrocytoma, neurodegenerative disorders (e.g., Alzheimer's Disease, Creutzfeldt-Jakob Disease, Parkinson's Disease, and Idiopathic Presenile Dementia), encephalomyelitis, cerebral malaria, meningitis, metabolic brain diseases (e.g., phenylketonuria and pyruvate carboxylase deficiency), cerebellar ataxia, ataxia telangiectasia, and AIDS Dementia Complex, schizophrenia, attention deficit disorder, hyperactive attention deficit disorder, autism, and obsessive compulsive disorders.

[1045] The recitation of “Respiratory” in the “Preferred Indication” column indicates that the corresponding nucleic acid and protein, or antibody against the same, of the invention (or fragment or variant thereof), may be used for example, to diagnose, treat, prevent, and/or ameliorate diseases and/or disorders relating to neoplastic diseases (e.g., as described below under “Hyperproliferative Disorders”) and diseases or disorders of the respiratory system (e.g., as described below under “Respiratory Disorders”).

[1046] In specific embodiments, a protein, nucleic acid, or antibody of the invention (or fragment or variant thereof) having a “Respiratory” recitation in the “Preferred Indication” column of Table 1D, may be used for example, to diagnose, treat, prevent, and/or ameliorate a disease or disorder selected from the group consisting of: cancers of the respiratory system such as larynx cancer, pharynx cancer, trachea cancer, epiglottis cancer, lung cancer, squamous cell carcinomas, small cell (oat cell) carcinomas, large cell carcinomas, and adenocarcinomas, allergic reactions, cystic fibrosis, sarcoidosis, histiocytosis X, infiltrative lung diseases (e.g., pulmonary fibrosis and lymphoid interstitial pneumonia), obstructive airway diseases (e.g., asthma, emphysema, chronic or acute bronchitis), occupational lung diseases (e.g., silicosis and asbestosis), pneumonia, and pleurisy.

[1047] The recitation of “Endocrine” in the “Preferred Indication” column indicates that the corresponding nucleic acid and protein, or antibody against the same, of the invention (or fragment or variant thereof), may be used for example, to diagnose, treat, prevent, and/or ameliorate diseases and/or disorders relating to neoplastic diseases (e.g., as described below under “Hyperproliferative Disorders”) and diseases or disorders of the respiratory system (e.g., as described below under “Respiratory Disorders”), renal disorders (e.g., as described below under “Renal Disorders”), and disorders of the endocrine system (e.g., as described below under “Endocrine Disorders”.

[1048] In specific embodiments, a protein, nucleic acid, or antibody of the invention (or fragment or variant thereof) having an “Endocrine” recitation in the “Preferred Indication” column of Table 1D, may be used for example, to diagnose, treat, prevent, and/or ameliorate a disease or disorder selected from the group consisting of: cancers of endocrine tissues and organs (e.g., cancers of the hypothalamus, pituitary gland, thyroid gland, parathyroid glands, pancreas, adrenal glands, ovaries, and testes), diabetes (e.g., diabetes insipidus, type I and type II diabetes mellitus), obesity, disorders related to pituitary glands (e.g., hyperpituitarism, hypopituitarism, and pituitary dwarfism), hypothyroidism, hyperthyroidism, goiter, reproductive disorders (e.g. male and female infertility), disorders related to adrenal glands (e.g., Addison's Disease, corticosteroid deficiency, and Cushing's Syndrome), kidney cancer (e.g., hypernephroma, transitional cell cancer, and Wilm's tumor), diabetic nephropathy, interstitial nephritis, polycystic kidney disease, glomerulonephritis (e.g., IgM mesangial proliferative glomerulonephritis and glomerulonephritis caused by autoimmune disorders; such as Goodpasture's syndrome), and nephrocalcinosis.

[1049] The recitation of “Digestive” in the “Preferred Indication” column indicates that the corresponding nucleic acid and protein, or antibody against the same, of the invention (or fragment or variant thereof), may be used for example, to diagnose, treat, prevent, and/or ameliorate diseases and/or disorders relating to neoplastic diseases (e.g., as described below under “Hyperproliferative Disorders”) and diseases or disorders of the gastrointestinal system (e.g., as described below under “Gastrointestinal Disorders”.

[1050] In specific embodiments, a protein, nucleic acid, or antibody of the invention (or fragment or variant thereof) having a “Digestive” recitation in the “Preferred Indication” column of Table 1D, may be used for example, to diagnose, treat, prevent, and/or ameliorate a disease or disorder selected from the group consisting of: ulcerative colitis, appendicitis, Crohn's disease, hepatitis, hepatic encephalopathy, portal hypertension, cholelithiasis, cancer of the digestive system (e.g., biliary tract cancer, stomach cancer, colon cancer, gastric cancer, pancreatic cancer, cancer of the bile duct, tumors of the colon (e.g., polyps or cancers), and cirrhosis), pancreatitis, ulcerative disease, pyloric stenosis, gastroenteritis, gastritis, gastric atropy, benign tumors of the duodenum, distension, irritable bowel syndrome, malabsorption, congenital disorders of the small intestine, bacterial and parasitic infection, megacolon, Hirschsprung's disease, aganglionic megacolon, acquired megacolon, colitis, anorectal disorders (e.g., anal fistulas, hemorrhoids), congenital disorders of the liver (e.g., Wilson's disease, hemochromatosis, cystic fibrosis, biliary atresia, and alpha1-antitrypsin deficiency), portal hypertension, cholelithiasis, and jaundice.

[1051] The recitation of “Connective/Epithelial” in the “Preferred Indication” column indicates that the corresponding nucleic acid and protein, or antibody against the same, of the invention (or fragment or variant thereof), may be used for example, to diagnose, treat, prevent, and/or ameliorate diseases and/or disorders relating to neoplastic diseases (e.g., as described below under “Hyperproliferative Disorders”), cellular and genetic abnormalities (e.g., as described below under “Diseases at the Cellular Level”), angiogenesis (e.g., as described below under “Anti-Angiogenesis Activity”), and or to promote or inhibit regeneration (e.g., as described below under “Regeneration”), and wound healing (e.g., as described below under “Wound Healing and Epithelial Cell Proliferation”).

[1052] In specific embodiments, a protein, nucleic acid, or antibody of the invention (or fragment or variant thereof) having a “Connective/Epithelial” recitation in the “Preferred Indication” column of Table 1D, may be used for example, to diagnose, treat, prevent, and/or ameliorate a disease or disorder selected from the group consisting of: connective tissue metaplasia, mixed connective tissue disease, focal epithelial hyperplasia, epithelial metaplasia, mucoepithelial dysplasia, graft v. host disease, polymyositis, cystic hyperplasia, cerebral dysplasia, tissue hypertrophy, Alzheimer's disease, lymphoproliferative disorder, Waldenstron's macroglobulinemia, Crohn's disease, pernicious anemia, idiopathic Addison's disease, glomerulonephritis, bullous pemphigoid, Sjogren's syndrome, diabetes mellitus, cystic fibrosis, osteoblastoma, osteoclastoma, osteosarcoma, chondrosarcoma, osteoporosis, osteocarthritis, periodontal disease, wound healing, relapsing polychondritis, vasculitis, polyarteritis nodosa, Wegener's granulomatosis, cellulitis, rheumatoid arthritis, psoriatic arthritis, discoid lupus erythematosus, systemic lupus erythematosus, scleroderma, CREST syndrome, Sjogren's syndrome, polymyositis, dermatomyositis, mixed connective tissue disease, relapsing polychondritis, vasculitis, Henoch-Schonlein syndrome, erythema nodosum, polyarteritis nodosa, temporal (giant cell) arteritis, Takayasu's arteritis, Wegener's granulomatosis, Reiter's syndrome, Behcet's syndrome, ankylosing spondylitis, cellulitis, keloids, Ehler Danlos syndrome, Marfan syndrome, pseudoxantoma elasticum, osteogenese imperfecta, chondrodysplasias, epidermolysis bullosa, Alport syndrome, and cutis laxa.

TABLE 1D

| | cDNA | |
|---|---|---|
| Gene No. | Clone ID | Preferred Indication Identifier |
| 1 | HERHC26 | Cancer |
| 2 | HERHC24 | Cancer |
| 3 | HEELM24 | Cancer |
| 4 | HEFEZ39 | Cancer |
| 5 | HEFFH42 | Cancer |
| 6 | HLCOO14 | Cancer |
| 7 | HLEFV28 | Cancer |
| 8 | HLEGA38 | Respiratory |
| 9 | HPCBJ78 | Cancer |
| 10 | HEDBJ87 | Cancer |
| 11 | HEELE81 | Cancer |
| 12 | HEFEW51 | Cancer |
| 13 | HLEFO22 | Cancer |
| 14 | HEELG41 | Cancer |
| 15 | HNEMP21 | Cancer |
| 16 | HNEMU30 | Digestive, |
| | | Immune/Hematopoietic, |
| | | Reproductive |
| 17 | HNEMO56 | Digestive, |
| | | Reproductive |
| 18 | HEELQ12 | Immune/Hematopoietic |
| 19 | HLCOY89 | Immune/Hematopoietic, |
| | | Reproductive |
| 20 | HLCPI67 | Cancer |
| 21 | HCPRA19 | Cancer |
| 22 | HEFEN82 | Cancer |
| 23 | HEELL43 | Cancer |
| 24 | HLEFG68 | Reproductive |
| 25 | HERHL91 | Cancer |
| 26 | HEFFD22 | Digestive, |
| | | Immune/Hematopoietic, |
| | | Reproductive |
| 27 | HPCCR42 | Digestive, |
| | | Reproductive |
| 28 | HECHI83 | Cancer, |
| | | Immune/Hematopoietic, |
| | | Cardiovascular |
| 29 | HEFEL28 | Digestive, |
| | | Musculoskeletal, |
| | | Reproductive |
| 30 | HLCON84 | Cancer |
| 31 | HLEFK80 | Cancer |
| 32 | HLCPQ02 | Cancer |
| 33 | HLEFR48 | Cancer |
| 34 | HEFFA92 | Cancer |
| 35 | HLEFF44 | Cancer |
| 36 | HLCOG83 | Connective/Epithelial, |
| | | Digestive, |
| | | Respiratory |
| 37 | HLEFV31 | Cancer |
| 38 | HLCOW38 | Cancer |
| 39 | HEFEP03 | Cancer |
| 40 | HEFFD82 | Cancer |
| 41 | HECHH44 | Cancer |
| 42 | HLEGA47 | Cancer |
| 43 | HEDBJ79 | Digestive, |
| | | Immune/Hematopoietic, |
| | | Reproductive |
| 44 | HEEML62 | Cancer |
| 45 | HEELB16 | Cancer |
| 46 | HEDBH12 | Cancer |
| 47 | HABDM96 | Cancer |
| 48 | HPCBB59 | Cancer |
| 49 | HERHD36 | Cancer |
| 50 | HIGAT21 | Cancer |
| 51 | HIGBG18 | Digestive |
| 52 | HIGBQ67 | Cancer |
| 53 | HPNCW15 | Cancer |
| 54 | HIGAT76 | Cancer |
| 55 | HPNCC51 | Cancer |
| 56 | HIGBR51 | Digestive |
| 57 | HECHQ69 | Digestive, |
| | | Neural/Sensory |
| 58 | HECJN68 | Cancer, |
| | | Immune/Hematopoietic, |
| | | Cardiovascular |
| 59 | HEFJO40 | Cancer |
| 60 | HEGLK47 | Cancer |
| 61 | HEDDJ18 | Cancer |
| 62 | HEGLA38 | Cancer |
| 63 | HEHXT39 | Connective/Epithelial, |
| | | Digestive, |
| | | Respiratory |
| 64 | HMFHI61 | Cancer |
| 65 | HEHNH91 | Cancer |
| 66 | HECJZ49 | Cancer |
| 67 | HPCCR42 | Digestive, |
| | | Reproductive |
| 68 | HECHP58 | Cancer |
| 69 | HEFGF49 | Cancer |
| 70 | HEFJI37 | Cancer |
| 71 | HEDCP16 | Cancer |
| 72 | HECJR25 | Digestive, |
| | | Neural/Sensory |
| 73 | HEEMT12 | Connective/Epithelial, |
| | | Digestive, |
| | | Respiratory |
| 74 | HECHX69 | Cancer |
| 75 | HEGLP63 | Connective/Epithelial, |
| | | Digestive, |
| | | Respiratory |
| 76 | HEFIA60 | Cancer |
| 77 | HEFID84 | Cancer |
| 78 | HEHXR32 | Cancer |
| 79 | HMFHW53 | Cancer |
| 80 | HEDCZ72 | Digestive, |
| | | Immune/Hematopoietic, |
| | | Musculoskeletal |
| 81 | HECKQ42 | Connective/Epithelial, |
| | | Digestive, |
| | | Respiratory |
| 82 | HEHXJ43 | Cancer |
| 83 | HECKS63 | Cancer |
| 84 | HEDEQ16 | Cancer |
| 85 | HEENI83 | Cancer |
| 86 | HMFHN24 | Cancer |
| 87 | HMFHX66 | Cancer |
| 88 | HEENV67 | Cancer |
| 89 | HECIB71 | Cancer |
| 90 | HEHNE29 | Cancer |
| 91 | HEHXS16 | Cancer |
| 92 | HEDDB56 | Cancer |
| 93 | HEENK36 | Cancer |
| 94 | HMFHT07 | Cancer |
| 95 | HNEMX81 | Cancer |
| 96 | HIGBR51 | Digestive |
| 97 | HECKK69 | Connective/Epithelial, |
| | | Digestive, |
| | | Respiratory |
| 98 | HEDEY26 | Cancer |
| 99 | HEFHJ61 | Cancer |
| 100 | HEHXH94 | Cancer |
| 101 | HEFHC80 | Cancer |
| 102 | HEDEJ55 | Cancer |
| 103 | HEEMW15 | Connective/Epithelial, |
| | | Musculoskeletal |
| 104 | HMFIH88 | Cancer |
| 105 | HEFJN45 | Cancer |
| 106 | HEFKA79 | Cancer |
| 107 | HEGLH36 | Cancer, |
| | | Immune/Hematopoietic, |
| | | Cardiovascular |
| 108 | HMFHX51 | Cancer |
| 109 | HEIDS26 | Cancer |
| 110 | HMFHL01 | Cancer |
| 111 | HECKQ90 | Cancer |
| 112 | HEIDA30 | Cancer |
| 113 | HEDDM74 | Cancer |
| 114 | HEHXC34 | Connective/Epithelial, |
| | | Digestive |
| 115 | HEHXL26 | Cancer |
| 116 | HEENT17 | Cancer |
| 117 | HEFHB48 | Cancer |
| 118 | HEFIF14 | Cancer |
| 119 | HNEMX50 | Cancer |
| 120 | HEFJJ04 | Cardiovascular, |
| | | Immune/Hematopoietic |
| 121 | HEHXW79 | Connective/Epithelial, |
| | | Digestive |
| 122 | HEHMJ47 | Cancer |
| 123 | HRCRE68 | Cancer |
| 124 | HMFHV45 | Cancer |
| 125 | HECJZ57 | Cancer |
| 126 | HEFJW14 | Cancer |
| 127 | HMFHC03 | Cancer |
| 128 | HMFHE73 | Cancer |
| 129 | HECKH20 | Digestive, |
| | | Neural/Sensory |
| 130 | HMFHH91 | Immune/Hematopoietic, |
| | | Mixed Fetal |
| 131 | HMFIH13 | Cancer |
| 132 | HTLRZ23 | Cancer |
| 133 | HECKK69 | Connective/Epithelial, |
| | | Digestive, |
| | | Respiratory |
| 134 | HTLRO18 | Cancer |
| 135 | HDPXG11 | Cancer |
| 136 | HGTMQ07 | Cancer |
| 137 | HRDHH73 | Cancer |
| 138 | HRCSY77 | Cancer |
| 139 | HKVBG77 | Cancer |
| 140 | HXDCQ39 | Cancer |
| 141 | HECHZ42 | Cancer |
| 142 | HGTJD50 | Digestive, |
| | | Reproductive |
| 143 | HEDDB56 | Cancer |
| 144 | HECHS69 | Cancer |
| 145 | HEFIA60 | Cancer |
| 146 | HEFIF14 | Cancer |
| 147 | HEDCP16 | Cancer |
| 148 | HEDEX64 | Immune/Hematopoietic |
| 149 | HDPAV18 | Cancer |
| 150 | HECKQ42 | Connective/Epithelial, |
| | | Digestive, |
| | | Respiratory |
| 151 | HGTLT88 | Cancer |
| 152 | HRCSG16 | Cancer |
| 153 | HQQBQ63 | Immune/Hematopoietic, |
| | | Neural/Sensory |
| 154 | HRDIJ66 | Cancer |
| 155 | HRDKC71 | Cancer |
| 156 | HQQDK22 | Cancer |
| 157 | HCBOG68 | Digestive, |
| | | Reproductive, |
| | | Renal, |
| | | Cardiovascular, |
| | | Infectious, |
| | | Metabolic/Endocrine |

Description of Table 1E

[1053] Table 1E provides information related to biological activities and preferred indications for polynucleotides and polypeptides of the invention (including antibodies, agonists, and/or antagonists thereof). Table 1E also provides information related to assays which may be used to test polynucleotides and polypeptides of the invention (including antibodies, agonists, and/or antagonists thereof) for the corresponding biological activities. The first column (“Gene No.”) provides the gene number in the application for each clone identifier. The second column (“cDNA Clone ID:”) provides the unique clone identifier for each clone as previously described and indicated in Tables 1A, 1B, and 1D. The third column (“AA SEQ ID NO:Y”) indicates the Sequence Listing SEQ ID Number for polypeptide sequences encoded by the corresponding cDNA clones (also as indicated in Tables 1A, 1B, and 2). The fourth column (“Biological Activity”) indicates a biological activity corresponding to the indicated polypeptides (or polynucleotides encoding said polypeptides). The fifth column (“Exemplary Activity Assay”) further describes the corresponding biological activity and provides information pertaining to the various types of assays which may be performed to test, demonstrate, or quantify the corresponding biological activity. The sixth column (“Preferred Indications”) describes particular embodiments of the invention and indications (e.g. pathologies, diseases, disorders, abnormalities, etc.) for which polynucleotides and polypeptides of the invention (including antibodies, agonists, and/or antagonists thereof) may be used in detecting, preventing, diagnosing, prognosticating, treating, and/or ameliorating.

[1054] Table 1E describes the use of, inter alia, FMAT technology for testing or demonstrating various biological activities. Fluorometric microvolume assay technology (FMAT) is a fluorescence-based system which provides a means to perform nonradioactive cell- and bead-based assays to detect activation of cell signal transduction pathways. This technology was designed specifically for ligand binding and immunological assays. Using this technology, fluorescent cells or beads at the bottom of the well are detected as localized areas of concentrated fluorescence using a data processing system. Unbound fluorophore comprising the background signal is ignored, allowing for a wide variety of homogeneous assays. FMAT technology may be used for peptide ligand binding assays, immunofluorescence, apoptosis, cytotoxicity, and bead-based immunocapture assays. See, Miraglia S et al., “Homogeneous cell and bead based assays for highthroughput screening using fluorometric microvolume assay technology,” Journal of Biomolecular Screening; 4:193-204 (1999). In particular, FMAT technology may be used to test, confirm, and/or identify the ability of polypeptides (including polypeptide fragments and variants) to activate signal transduction pathways. For example, FMAT technology may be used to test, confirm, and/or identify the ability of polypeptides to upregulate production of immunomodulatory proteins (such as, for example, interleukins, GM-CSF, Rantes, and Tumor Necrosis factors, as well as other cellular regulators (e.g., insulin)).

[1055] Table 1E also describes the use of kinase assays for testing, demonstrating, or quantifying biological activity. In this regard, the phosphorylation and de-phosphorylation of specific amino acid residues (e.g., Tyrosine, Serine, Threonine) on cell-signal transduction proteins provides a fast, reversible means for activation and de-activation of cellular signal transduction pathways. Moreover, cell signal transduction via phosphorylation/dephosphorylation is crucial to the regulation of a wide variety of cellular processes (e.g. proliferation, differentiation, migration, apoptosis, etc.). Accordingly, kinase assays provide a powerful tool useful for testing, confirming, and/or identifying polypeptides (including polypeptide fragments and variants) that mediate cell signal transduction events via protein phosphorylation. See, e.g., Forrer, P., Tamaskovic R., and Jaussi, R. “Enzyme-Linked Immunosorbent Assay for Measurement of JNK, ERK, and p38 Kinase Activities” Biol. Chem. 379(8-9): 1101-1110 (1998).

TABLE 1E

| Gene No. | cDNA Clone ID | AA SEQ ID NO: Y | Biological Activity | Exemplary Activity Assay | Preferred Indication |
|---|---|---|---|---|---|
| 3 | HEELM24 | 195 | Activation of transcription through | Assays for activation of transcription through the | A highly preferred embodiment of the invention |
| | | | serum response element (SRE) in | Serum Response Element (SRE) are well-known | includes a method for stimulating immune cell |
| | | | epithelial cells. | in the art and may be used or routinely modified | proliferation (e.g., T-cells). An alternative highly |
| | | | | to assess the ability of polypeptides of the | preferred embodiment of the invention includes a |
| | | | | invention (including antibodies and agonists or | method for inhibiting immune cell proliferation (e.g., |
| | | | | antagonists of the invention) to regulate the serum | T-cells). |
| | | | | response factors and modulate the expression of | A highly preferred embodiment of the invention |
| | | | | genes involved in growth. Exemplary assays for | includes a method for activating immune cells. An |
| | | | | transcription through the SRE that may be used or | alternative highly preferred embodiment of the |
| | | | | routinely modified to test SRE activity of the | invention includes a method for inhibiting the |
| | | | | polypeptides of the invention (including | activation of and/or inactivating immune cells. |
| | | | | antibodies and agonists or antagonists of the | Additional highly preferred indications include |
| | | | | invention) include assays disclosed in Berger et | inflammation and inflammatory disorders, and |
| | | | | al., Gene 66: 1-10 (1998); Cullen and Malm, | immune disorders as described below under “Immune |
| | | | | Methods in Enzymol 216: 362-368 (1992); | Activity” and “Blood-Related disorders”. |
| | | | | Henthorn et al., Proc Natl Acad Sci USA 85: 6342-6346 | Highly preferred indications include autoimmune |
| | | | | (1988); and Black et al., Virus Genes | diseases (e.g., rheumatoid arthritis, systemic lupus |
| | | | | 12(2): 105-117 (1997), the content of each of | erythematosis, multiple sclerosis and/or as described |
| | | | | which are herein incorporated by reference in its | below), immunodeficiencies (e.g., as described |
| | | | | entirety. Epithelial cells that may be used | below), boosting a T cell-mediated immune response, |
| | | | | according to these assays are publicly available | and suppressing a T cell-mediated immune response. |
| | | | | (e.g., through the ATCC) and/or may be routinely | An additional highly preferred indication includes |
| | | | | generated. Polypeptides of the invention | infection (e.g., AIDS, and/or as described below under |
| | | | | (including antibodies and agonists or antagonists | “Infectious Disease”). |
| | | | | of the invention) that modulate SRE activation | Highly preferred indications include neoplastic |
| | | | | may be important for inflammation, and bacterial | diseases (e.g., melanoma, renal cell carcinoma, |
| | | | | and viral infection. | leukemia, lymphoma, and/or as described below |
| | | | | | under “Hyperproliferative Disorders”). Highly |
| | | | | | preferred indications include neoplasms and cancers, |
| | | | | | such as, for example, melanoma (e.g., metastatic |
| | | | | | melanoma), renal cell carcinoma (e.g., metastatic |
| | | | | | renal cell carcinoma), leukemia, lymphoma (e.g., T |
| | | | | | cell lymphoma), and prostate, breast, lung, colon, |
| | | | | | pancreatic, esophageal, stomach, brain, liver and |
| | | | | | urinary cancer. Other preferred indications include |
| | | | | | benign dysproliferative disorders and pre-neoplastic |
| | | | | | conditions, such as, for example, hyperplasia, |
| | | | | | metaplasia, and/or dysplasia. |
| | | | | | A highly preferred indication is infection (e.g., |
| | | | | | tuberculosis, infections associated with granulomatous |
| | | | | | disease, and osteoporosis, and/or an infectious disease |
| | | | | | as described below under “Infectious Disease”). A |
| | | | | | highly preferred indication is AIDS. |
| | | | | | Additional highly preferred indications include |
| | | | | | suppression of immune reactions to transplanted |
| | | | | | organs and/or tissues, uveitis, psoriasis, and tropical |
| | | | | | spastic paraparesis. |
| | | | | | Preferred indications also include anemia, |
| | | | | | pancytopenia, leukopenia, thrombocytopenia, |
| | | | | | Hodgkin's disease, acute lymphocytic anemia (ALL), |
| | | | | | plasmacytomas, multiple myeloma, Burkitt's |
| | | | | | lymphoma, arthritis, granulomatous disease, |
| | | | | | inflammatory bowel disease, sepsis, neutropenia, |
| | | | | | neutrophilia, hemophilia, hypercoagulation, diabetes |
| | | | | | mellitus, endocarditis, meningitis, Lyme Disease, |
| | | | | | asthma and allergy. |
| 3 | HEELM24 | 195 | Modulation of cAMP-Response | Assays for the activation of transcription through | A highly preferred indication is diabetes mellitus. |
| | | | Element (CRE) in adipocytes. | the cAMP-Response Element (CRE) are well- | Additional highly preferred indications include |
| | | | | known in the art and may be used or routinely | complications associated with diabetes (e.g., diabetic |
| | | | | modified to assess the ability of polypeptides of | retinopathy, diabetic nephropathy, kidney disease |
| | | | | the invention (including antibodies and agonists or | (e.g., renal failure, nephropathy and/or other diseases |
| | | | | antagonists of the invention) to regulate the CRE | and disorders as described in the “Renal Disorders” |
| | | | | and modulate the expression of genes involved in | section below), diabetic neuropathy, nerve disease and |
| | | | | cell metabolism, proliferation, and growth. | nerve damage (e.g., due to diabetic neuropathy), blood |
| | | | | Polypeptides of the invention (including | vessel blockage, heart disease, stroke, impotence (e.g., |
| | | | | antibodies and agonists or antagonists of the | due to diabetic neuropathy or blood vessel blockage), |
| | | | | invention) that modulate CRE activation may be | seizures, mental confusion, drowsiness, nonketotic |
| | | | | important for metabolic and growth disorders such | hyperglycemic-hyperosmolar coma, cardiovascular |
| | | | | as obesity and diabetes. | disease (e.g., heart disease, atherosclerosis, |
| | | | | | microvascular disease, hypertension, stroke, and other |
| | | | | | diseases and disorders as described in the |
| | | | | | “Cardiovascular Disorders” section below), |
| | | | | | dyslipidemia, endocrine disorders (as described in the |
| | | | | | “Endocrine Disorders” section below), neuropathy, |
| | | | | | vision impairment (e.g., diabetic retinopathy and |
| | | | | | blindness), ulcers and impaired wound healing, and |
| | | | | | infection (e.g., infectious diseases and disorders as |
| | | | | | described in the “Infectious Diseases” section below, |
| | | | | | especially of the urinary tract and skin). An |
| | | | | | additional highly preferred indication is obesity and/or |
| | | | | | complications associated with obesity. Additional |
| | | | | | highly preferred indications include weight loss or |
| | | | | | alternatively, weight gain. Additional highly |
| | | | | | preferred indications are complications associated |
| | | | | | with insulin resistance. |
| 3 | HEELM24 | 195 | Production of IL-4, particularly | IL-4 is produced at elevated levels in the | A highly preferred embodiment of the invention |
| | | | in immune cells such as T-cells | asthmatic lung and is one of the central regulators | includes a method for stimulating (e.g., increasing) |
| | | | (including natural isolates or | of many of the hallmark features of asthma and | IL-4 production. An alternative highly preferred |
| | | | T-cell lines). | allergy diseases. | embodiment of the invention includes a method for |
| | | | | Human T cells are primary human | inhibiting (e.g., reducing) IL-4 production. |
| | | | | lymphocytes that mature in the thymus and | A highly preferred indication includes asthma. |
| | | | | express a T cell receptor and CD3, CD4, or CD8. | A highly preferred indication includes allergy. |
| | | | | These cells mediate humoral or cell-mediated | A highly preferred indication includes rhinitis. |
| | | | | immunity and may be preactivated to enhance | Additional highly preferred indications include |
| | | | | responsiveness to immunomodulatory factors. | inflammation and inflammatory disorders. |
| | | | | Assays to monitor modulation of the IL-4 | Highly preferred indications include neoplastic |
| | | | | promoter and IL-4 gene transcription/translation | diseases (e.g., leukemia, lymphoma, melanoma, |
| | | | | are well-known in the art and may be used or | and/or as described below under “Hyperproliferative |
| | | | | routinely modified to assess the ability of | Disorders”). Preferred indications include neoplasms |
| | | | | polypeptides of the invention (including | and cancers, such as, for example, leukemia, |
| | | | | antibodies and agonists or antagonists of the | lymphoma, melanoma, and prostate, breast, lung, |
| | | | | invention) to regulate IL-4 production and | colon, pancreatic, esophageal, stomach, brain, liver |
| | | | | modulate expression of genes involved in immune | and urinary cancer. Other preferred indications |
| | | | | cell responses. | include benign dysproliferative disorders and pre- |
| | | | | Furthermore, assays for immunomodulatory | neoplastic conditions, such as, for example, |
| | | | | proteins secreted by TH2 cells (such as IL-4) that | hyperplasia, metaplasia, and/or dysplasia. |
| | | | | stimulate B cells, T cells, macrophages and mast | Preferred indications include blood disorders (e.g., |
| | | | | cells and promote polarization of CD4+ cells into | as described below under “Immune Activity”, “Blood- |
| | | | | TH2 cells are well known in the art and may be | Related Disorders”, and/or “Cardiovascular |
| | | | | used or routinely modified to assess the ability of | Disorders”). Preferred indications include |
| | | | | polypeptides of the invention (including | autoimmune diseases (e.g., rheumatoid arthritis, |
| | | | | antibodies and agonists or antagonists of the | systemic lupus erythematosis, multiple sclerosis |
| | | | | invention) to mediate immunomodulation, | and/or as described below) and immunodeficiencies |
| | | | | stimulate immune cells, modulate immune cell | (e.g., as described below). |
| | | | | polarization, and/or mediate humoral or cell- | Preferred indications include anemia, |
| | | | | mediated immunity. Exemplary assays that test | pancytopenia, leukopenia, thrombocytopenia, |
| | | | | for immunomodulatory proteins evaluate the | Hodgkin's disease, acute lymphocytic anemia (ALL), |
| | | | | production of cytokines, such as IL-4, and the | plasmacytomas, multiple myeloma, Burkitt's |
| | | | | stimulation of immune cells, such as B cells, T | lymphoma, arthritis, AIDS, granulomatous disease, |
| | | | | cells, macrophages and mast cells. Such assays | inflammatory bowel disease, sepsis, neutropenia, |
| | | | | that may be used or routinely modified to test | neutrophilia, psoriasis, suppression of immune |
| | | | | immunomodulatory activity of polypeptides of the | reactions to transplanted organs and tissues, |
| | | | | invention (including antibodies and agonists or | hemophilia, hypercoagulation, diabetes mellitus, |
| | | | | antagonists of the invention) include the assays | endocarditis, meningitis, and Lyme Disease. |
| | | | | disclosed in Miraglia et al., J Biomolecular | An additional preferred indication is infection (e.g., |
| | | | | Screening 4: 193-204 (1999); Rowland et al., | an infectious disease as described below under |
| | | | | “Lymphocytes: a practical approach” Chapter | “Infectious Disease”). |
| | | | | 6: 138-160 (2000); Gonzalez et al., J Clin Lab | |
| | | | | Anal 8(5): 277-283 (1194); Yssel et al., Res | |
| | | | | Immunol 144(8): 610-616 (1993); Bagley et al., | |
| | | | | Nat Immunol 1(3): 257-261 (2000); and van der | |
| | | | | Graaff et al., Rheumatology (Oxford) 38(3): 214-220 | |
| | | | | (1999), the contents of each of which are | |
| | | | | herein incorporated by reference in its entirety. | |
| | | | | Human T cells that may be used according to | |
| | | | | these assays may be isolated using techniques | |
| | | | | disclosed herein or otherwise known in the art. | |
| 4 | HEFEZ39 | 196 | Production of | Assays for immunomodulatory proteins produced | A highly preferred embodiment of the invention |
| | | | Tumor | by activated macrophages, T cells, fibroblasts, | includes a method for inhibiting (e.g., reducing) TNF |
| | | | Necrosis | smooth muscle, and other cell types that exert a | alpha production. An alternative highly preferred |
| | | | Factor-Alpha | wide variety of inflammatory and cytotoxic | embodiment of the invention includes a method for |
| | | | (TNFa) by | effects on a variety of cells are well known in the | stimulating (e.g., increasing) TNF alpha production. |
| | | | immune | art and may be used or routinely modified to | Highly preferred indications include blood |
| | | | cells, | assess the ability of polypeptides of the invention | disorders (e.g., as described below under “Immune |
| | | | particularly | (including antibodies and agonists or antagonists | Activity”, “Blood-Related Disorders”, and/or |
| | | | T-cells; | of the invention) to mediate immunomodulation, | “Cardiovascular Disorders”), Highly preferred |
| | | | wherein | modulate inflammation and cytotoxicity, and | indications include autoimmune diseases (e.g., |
| | | | TNFa | mediate humoral and/or cell-mediated immunity. | rheumatoid arthritis, systemic lupus erythematosis, |
| | | | secretion is | Exemplary assays that test for immunomodulatory | Crohn's disease, multiple sclerosis and/or as described |
| | | | modulated by | proteins evaluate the production of cytokines such | below), immunodeficiencies (e.g., as described |
| | | | contact with | as tumor necrosis factor alpha (TNFa), and the | below), boosting a T cell-mediated immune response, |
| | | | secreted | induction or inhibition of an inflammatory or | and suppressing a T cell-mediated immune response. |
| | | | proteins in | cytotoxic response. Such assays that may be used | Additional highly preferred indications include |
| | | | cell | or routinely modified to test immunomodulatory | inflammation and inflammatory disorders, and |
| | | | supernatents | activity of polypeptides of the invention | treating joint damage in patients with rheumatoid |
| | | | and/or by | (including antibodies and agonists or antagonists | arthritis. An additional highly preferred indication is |
| | | | contact with | of the invention) include assays disclosed in | sepsis. |
| | | | membrane | Miraglia et al., J Biomolecular Screening 4: 193-204 | Highly preferred indications include neoplastic |
| | | | bound | (1999); Rowland et al., “Lymphocytes: a | diseases (e.g., leukemia, lymphoma, and/or as |
| | | | proteins | practical approach” Chapter 6: 138-160 (2000); | described below under “Hyperproliferative |
| | | | through in | Verhasselt et al., Eur J Immunol 28(11): 3886-3890 | Disorders”). Additionally, highly preferred |
| | | | vitro cell-cell | (1198); Dahlen et al., J Immunol | indications include neoplasms and cancers, such as, |
| | | | contact. | 160(7): 3585-3593 (1998); Verhasselt et al., J | leukemia, lymphoma, melanoma, glioma (e.g., |
| | | | | Immunol 158: 2919-2925 (1997); and Nardelli et | malignant glioma), solid tumors, and prostate, breast, |
| | | | | al., J Leukoc Biol 65: 822-828 (1999), the contents | lung, colon, pancreatic, esophageal, stomach, brain, |
| | | | | of each of which are herein incorporated by | liver and urinary cancer. Other preferred indications |
| | | | | reference in its entirety. Human T cells that may | include benign dysproliferative disorders and pre- |
| | | | | be used according to these assays may be isolated | neoplastic conditions, such as, for example, |
| | | | | using techniques disclosed herein or otherwise | hyperplasia, metaplasia, and/or dysplasia. |
| | | | | known in the art. Highly preferred assays include | Preferred indications include anemia, |
| | | | | those wherein TNFalpha production is tested for | pancytopenia, leukopenia, thrombocytopenia, |
| | | | | modulation by secreted proteins (in cell | Hodgkin's disease, acute lymphocytic anemia (ALL), |
| | | | | supernatents) or by cell-cell contact with | plasmacytomas, multiple myeloma, Burkitt's |
| | | | | membrane bound proteins on cells in co-culture | lymphoma, arthritis, asthma, AIDS, granulomatous |
| | | | | with T-cells. Human T cells are primary human | disease, inflammatory bowel disease, neutropenia, |
| | | | | lymphocytes that mature in the thymus and | neutrophilia, psoriasis, suppression of immune |
| | | | | express a T cell receptor and CD3, CD4, or CD8. | reactions to transplanted organs and tissues, |
| | | | | These cells mediate humoral or cell-mediated | hemophilia, hypercoagulation, diabetes mellitus, |
| | | | | immunity and may be preactivated to enhance | endocarditis, meningitis, Lyme Disease, cardiac |
| | | | | responsiveness to immunomodulatory factors. | reperfusion injury, and asthma and allergy. |
| | | | | | An additional preferred indication is infection |
| | | | | | (e.g., an infectious disease as described below under |
| | | | | | “Infectious Disease”). |
| 7 | HLEFV28 | 199 | Production of | Immunoglobulin G (IgG) is the predominant | A highly preferred embodiment of the invention |
| | | | Immunoglobulin | antibody molecule circulating in normal human | includes a method for stimulating antibody (in |
| | | | G (IgG) | blood plasma. IgG is a critical component of host | particular, IgG) production. An alternative highly |
| | | | in immune | environment defenses to pathogenic challenge | preferred embodiment of the invention includes a |
| | | | cells, | (particularly following primary challenge by viral | method for inhibiting (e.g., reducing) antibody (in |
| | | | particularly | or bacterial pathogens). IgG molecules are | particular, IgG) production. |
| | | | B-cells. | produced by B-cells. B-cell maturation occurs as | Highly preferred indications include infection (e.g., |
| | | | | these cells evolve to produce IgG molecules with | an infectious disease as described below under |
| | | | | high specificity for particular pathogens (e.g., | “Infectious Disease”), immune disorders (e.g., as |
| | | | | antibodies to a particular virus). Exemplary | described below under “Immune Activity” and |
| | | | | assays that may be used or routinely modified to | “Blood-Related Disorders”). Preferred indications |
| | | | | monitor modulation of B-cell IgG production by | include autoimmune diseases (e.g., rheumatoid |
| | | | | polypeptides of the invention (including | arthritis, systemic lupus erythematosis, multiple |
| | | | | antibodies and agonists or antagonists of the | sclerosis and/or as described below), |
| | | | | invention) are well known by those of ordinary | immunodeficiencies (e.g., as described below), |
| | | | | skill in the art. Such assays are particularly useful | boosting a B-cell mediated immune response, or |
| | | | | in identifying polypeptides of the invention | suppressing a B-cell-mediated immune response. |
| | | | | (including antibodies and agonists or antagonists | Additional preferred indications include inflammation |
| | | | | of the invention) that may be used to treat | and inflammatory disorders. Highly preferred |
| | | | | infectious diseases and immune disorders. | indications also include neoplastic diseases (e.g., |
| | | | | | leukemia, lymphoma, and/or as described below |
| | | | | | under “Hyperproliferative Disorders”). Highly |
| | | | | | preferred indications include neoplasms and cancers, |
| | | | | | such as, for example, leukemia, lymphoma (e.g., T |
| | | | | | cell lymphoma, Burkitt's lymphoma, non-Hodgkins |
| | | | | | lymphoma, Hodgkin's disease), melanoma, and |
| | | | | | prostate, breast, lung, colon, pancreatic, esophageal, |
| | | | | | stomach, brain, liver and urinary cancer. Other |
| | | | | | preferred indications include benign dysproliferative |
| | | | | | disorders and pre-neoplastic conditions, such as, for |
| | | | | | example, hyperplasia, metaplasia, and/or dysplasia. |
| | | | | | Preferred indications include anemia, pancytopenia, |
| | | | | | leukopenia, thrombocytopenia, acute lymphocytic |
| | | | | | anemia (ALL), plasmacytomas, multiple myeloma, |
| | | | | | arthritis, AIDS, granulomatous disease, inflammatory |
| | | | | | bowel disease, sepsis, neutropenia, neutrophilia, |
| | | | | | psoriasis, suppression of immune reactions to |
| | | | | | transplanted organs and tissues, hemophilia, |
| | | | | | hypercoagulation, diabetes mellitus, endocarditis, |
| | | | | | meningitis, Lyme Disease, and asthma and allergy. |
| 12 | HEFEW51 | 204 | Modulation | Alkaline phosphatase is indicative of an | Highly preferred indications include neoplastic |
| | | | of alkaline | osteogenic phenotype. Polypeptides of the | diseases (e.g., osteosarcoma and other bone cancers, |
| | | | phosphatase | invention (including antibodies and agonists or | leukemia, lymphoma, and/or as described below |
| | | | production; | antagonists of the invention) that affect ostogenic | under “Hyperproliferative Disorders”). Other |
| | | | particularly | potential may be useful in bone diseases such as | preferred indications include benign dysproliferative |
| | | | in | osteoporosis, and bone repair. | disorders and pre-neoplastic conditions, such as, for |
| | | | osteoblasts, | Assay to detect polypeptides of the invention | example, hyperplasia, metaplasia, and/or dysplasia. |
| | | | osteoclasts, | (including antibodies and agonists or antagonists | Highly preferred embodiments of the invention |
| | | | and | of the invention) that induce (or repress) alkaline | include using polypeptides of the invention (or |
| | | | multipotent | phosphatase production are well-known in the art | antibodies, agonists, or antagonists thereof) in |
| | | | cell lines. | and may be used or routinely modified to assess | detection, diagnosis, prevention, and/or treatment of |
| | | | | the ability of polypeptides of the invention | Bone and Cartilage Diseases, including but not |
| | | | | (including antibodies and agonists or antagonists | limited to Arthritis, Cartilage repair, Bone Repair, |
| | | | | of the invention) to modulate alkaline phosphatase | Osteoporosis, and related tumors including |
| | | | | production in vitro (e.g., in multipotent cell lines | chondrosarcomas, chondroblastomas, and |
| | | | | with osteogenic potential). | chondromas. |
| 12 | HEFEW51 | 204 | Production of | IFNgamma FMAT. IFNg plays a central role in | A highly preferred embodiment of the invention |
| | | | Interferon- | the immune system and is considered to be a | includes a method for stimulating the production of |
| | | | gamma | proinflammatory cytokine. IFNg promotes TH1 | IFNg. An alternative highly preferred embodiment of |
| | | | (IFNg) by T- | and inhibits TH2 differentiation; promotes IgG2a | the invention includes a method for inhibiting the |
| | | | cells; | and inhibits IgE secretion; induces macrophage | production of IFNg. |
| | | | particularly | activation; and increases MHC expression. | Highly preferred indications include blood |
| | | | wherein | Assays for immunomodulatory proteins produced | disorders (e.g., as described below under “Immune |
| | | | IFNg | by T cells and NK cells that regulate a variety of | Activity”, “Blood-Related Disorders”, and/or |
| | | | secretion is | inflammatory activities and inhibit TH2 helper | “Cardiovascular Disorders”), and infection (e.g., viral |
| | | | modulated by | cell functions are well known in the art and may | infections, tuberculosis, infections associated with |
| | | | contact with | be used or routinely modified to assess the ability | chronic granulomatosus disease and malignant |
| | | | secreted | of polypeptides of the invention (including | osteoporosis, and/or as described below under |
| | | | proteins in | antibodies and agonists or antagonists of the | “Infectious Disease”). Highly preferred indications |
| | | | cell | invention) to mediate immunomodulation, | include autoimmune disease (e.g., rheumatoid |
| | | | supernatents | regulate inflammatory activities, modulate TH2 | arthritis, systemic lupus erythematosis, multiple |
| | | | and/or by | helper cell function, and/or mediate humoral or | sclerosis and/or as described below), |
| | | | contact with | cell-mediated immunity. Exemplary assays that | immunodeficiency (e.g., as described below), |
| | | | membrane | test for immunomodulatory proteins evaluate the | boosting a T cell-mediated immune response, and |
| | | | bound | production of cytokines, such as Interferon | suppressing a T cell-mediated immune response. |
| | | | proteins | gamma (IFNg), and the activation of T cells. | Additional highly preferred indications include |
| | | | through in | Such assays that may be used or routinely | inflammation and inflammatory disorders. Additional |
| | | | vitro cell-cell | modified to test immunomodulatory activity of | preferred indications include idiopathic pulmonary |
| | | | contact. | polypeptides of the invention (including | fibrosis. Highly preferred indications include |
| | | | | antibodies and agonists or antagonists of the | neoplastic diseases (e.g., leukemia, lymphoma, |
| | | | | invention) include the assays disclosed in Miraglia | melanoma, and/or as described below under |
| | | | | et al., J Biomolecular Screening 4: 193-204 | “Hyperproliferative Disorders”). Highly preferred |
| | | | | (1999); Rowland et al., “Lymphocytes: a practical | indications include neoplasms and cancers, such as, |
| | | | | approach” Chapter 6: 138-160 (2000); Gonzalez et | for example, leukemia, lymphoma, melanoma, and |
| | | | | al., J Clin Lab Anal 8(5): 225-233 (1995); Billiau | prostate, breast, lung, colon, pancreatic, esophageal, |
| | | | | et al., Ann NY Acad Sci 856: 22-32 (1998); | stomach, brain, liver and urinary cancer. Other |
| | | | | Boehm et al., Annu Rev Immunol 15: 749-795 | preferred indications include benign dysproliferative |
| | | | | (1997), and Rheumatology (Oxford) 38(3): 214-20 | disorders and pre-neoplastic conditions, such as, for |
| | | | | (1999), the contents of each of which are herein | example, hyperplasia, metaplasia, and/or dysplasia. |
| | | | | incorporated by reference in its entirety. Human | Preferred indications include anemia, pancytopenia, |
| | | | | T cells that may be used according to these assays | leukopenia, thrombocytopenia, Hodgkin's disease, |
| | | | | may be isolated using techniques disclosed herein | acute lymphocytic anemia (ALL), plasmacytomas, |
| | | | | or otherwise known in the art. Human T cells are | multiple myeloma, Burkitt's lymphoma, arthritis, |
| | | | | primary human lymphocytes that mature in the | AIDS, granulomatous disease, inflammatory bowel |
| | | | | thymus and express a T Cell receptor and CD3, | disease, sepsis, neutropenia, neutrophilia, psoriasis, |
| | | | | CD4, or CD8. Highly preferred assays include | suppression of immune reactions to transplanted |
| | | | | those wherein IFNgamma production is tested for | organs and tissues, hemophilia, hypercoagulation, |
| | | | | modulation by secreted proteins (in cell | diabetes mellitus, endocarditis, meningitis, Lyme |
| | | | | supernatents) or by cell-cell contact with | Disease, asthma and allergy. |
| | | | | membrane bound proteins on cells in co-culture | |
| | | | | with T-cells. Human T-cells mediate humoral or | |
| | | | | cell-mediated immunity and may be preactivated | |
| | | | | to enhance responsiveness to immunomodulatory | |
| | | | | factors. | |
| 12 | HEFEW51 | 204 | Production of | IFNgamma FMAT. IFNg plays a central role in | A highly preferred embodiment of the invention |
| | | | Interferon- | the immune system and is considered to be a | includes a method for stimulating the production of |
| | | | gamma | proinflammatory cytokine. IFNg promotes TH1 | IFNg. An alternative highly preferred embodiment of |
| | | | (IFNg) by T- | and inhibits TH2 differentiation; promotes IgG2a | the invention includes a method for inhibiting the |
| | | | cells; | and inhibits IgE secretion; induces macrophage | production of IFNg. |
| | | | particularly | activation; and increases MHC expression. | Highly preferred indications include blood |
| | | | wherein | Assays for immunomodulatory proteins produced | disorders (e.g., as described below under “Immune |
| | | | IFNg | by T cells and NK cells that regulate a variety of | Activity”, “Blood-Related Disorders”, and/or |
| | | | secretion is | inflammatory activities and inhibit TH2 helper | “Cardiovascular Disorders”), and infection (e.g., viral |
| | | | modulated by | cell functions are well known in the art and may | infections, tuberculosis, infections associated with |
| | | | contact with | be used or routinely modified to assess the ability | chronic granulomatosus disease and malignant |
| | | | secreted | of polypeptides of the invention (including | osteoporosis, and/or as described below under |
| | | | proteins in | antibodies and agonists or antagonists of the | “Infectious Disease”). Highly preferred indications |
| | | | cell | invention) to mediate immunomodulation, | include autoimmune disease (e.g., rheumatoid |
| | | | supernatents | regulate inflammatory activities, modulate TH2 | arthritis, systemic lupus erythematosis, multiple |
| | | | and/or by | helper cell function, and/or mediate humoral or | sclerosis and/or as described below), |
| | | | contact with | cell-mediated immunity. Exemplary assays that | immunodeficiency (e.g., as described below), |
| | | | membrane | test for immunomodulatory proteins evaluate the | boosting a T cell-mediated immune response, and |
| | | | bound | production of cytokines, such as Interferon | suppressing a T cell-mediated immune response. |
| | | | proteins | gamma (IFNg), and the activation of T cells. | Additional highly preferred indications include |
| | | | through in | Such assays that may be used or routinely | inflammation and inflammatory disorders. Additional |
| | | | vitro cell-cell | modified to test immunomodulatory activity of | preferred indications include idiopathic pulmonary |
| | | | contact with | polypeptides of the invention (including | fibrosis. Highly preferred indications include |
| | | | cells in co- | antibodies and agonists or antagonists of the | neoplastic diseases (e.g., leukemia, lymphoma, |
| | | | culture, | invention) include the assays disclosed in Miraglia | melanoma, and/or as described below under |
| | | | wherein the | et al., J Biomolecular Screening 4: 193-204 | “Hyperproliferative Disorders”). Highly preferred |
| | | | co-cultured | (1999); Rowland et al., “Lymphocytes: a practical | indications include neoplasms and cancers, such as, |
| | | | cells express a | approach” Chapter 6: 138-160 (2000); Gonzalez et | for example, leukemia, lymphoma, melanoma, and |
| | | | costimulatory | al., J Clin Lab Anal 8(5): 225-233 (1995); Billiau | prostate, breast, lung, colon, pancreatic, esophageal, |
| | | | transmembrane | et al., Ann NY Acad Sci 856: 22-32 (1998); | stomach, brain, liver and urinary cancer. Other |
| | | | molecule. | Boehm et al., Annu Rev Immunol 15: 749-795 | preferred indications include benign dysproliferative |
| | | | | (1997), and Rheumatology (Oxford) 38(3): 214-20 | disorders and pre-neoplastic conditions, such as, for |
| | | | | (1999), the contents of each of which are herein | example, hyperplasia, metaplasia, and/or dysplasia. |
| | | | | incorporated by reference in its entirety. Human | Preferred indications include anemia, pancytopenia, |
| | | | | T cells that may be used according to these assays | leukopenia, thrombocytopenia, Hodgkin's disease, |
| | | | | may be isolated using techniques disclosed herein | acute lymphocytic anemia (ALL), plasmacytomas, |
| | | | | or otherwise known in the art. Human T cells are | multiple myeloma, Burkitt's lymphoma, arthritis, |
| | | | | primary human lymphocytes that mature in the | AIDS, granulomatous disease, inflammatory bowel |
| | | | | thymus and express a T Cell receptor and CD3, | disease, sepsis, neutropenia, neutrophilia, psoriasis, |
| | | | | CD4, or CD8. Highly preferred assays include | suppression of immune reactions to transplanted |
| | | | | those wherein IFNgamma production is tested for | organs and tissues, hemophilia, hypercoagulation, |
| | | | | modulation by secreted proteins (in cell | diabetes mellitus, endocarditis, meningitis, Lyme |
| | | | | supernatents) or by cell-cell contact with | Disease, asthma and allergy. |
| | | | | membrane bound proteins on cells in co-culture | |
| | | | | with T-cells, particularly wherein the co-cultured | |
| | | | | cells express a transmembrane costimulatory | |
| | | | | molecule. Human T-cells mediate humoral or | |
| | | | | cell-mediated immunity and may be preactivated | |
| | | | | to enhance responsiveness to immunomodulatory | |
| | | | | factors. | |
| 12 | HEFEW51 | 204 | Production of | Epithelial cells comprise a fundamental | Highly preferred indications include asthma and |
| | | | ICAM by | component of secretory cell layers lining mucous | allergy. Highly preferred indications also include |
| | | | epithelial | secreting organs such as the lungs, gastrointestinal | cardiovascular disorders, inflammation and |
| | | | cells | tract, and sinuses. More particularly, bronchial | inflammatory disorders, immunological disorders, and |
| | | | (particularly | epitheliae comprise epithelial cells lining the | neoplastic disorders (e.g. cancer/tumorigenesis) such |
| | | | by cells from | bronchial passages of lungs. The expression of | as described below under “Cardiovascular Disorders”, |
| | | | normal | ICAM (CD54), a integral membrane protein, can | “Immune Activity”, “Blood-Related Disorders”, |
| | | | human | be up-regulated by cytokines or other factors, and | and/or “Hyperproliferative Disorders”). |
| | | | bronchial | ICAM expression is important in mediating | Highly preferred indications also include |
| | | | epitheliae). | immune and endothelial cell interactions leading | neoplasms and cancers such as, for example, lung |
| | | | | to immune and inflammatory responses. Assays | cancer, leukemia, lymphoma, melanoma, renal cell |
| | | | | for measuring expression of ICAM-1 are well- | carcinoma, and prostate, breast, lung, colon, |
| | | | | known in the art and may be used or routinely | pancreatic, esophageal, stomach, brain, liver and |
| | | | | modified to assess the ability of polypeptides of | urinary cancer. Other preferred indications include |
| | | | | the invention (including antibodies and agonists or | benign dysproliferative disorders and pre-neoplastic |
| | | | | antagonists of the invention) to regulate ICAM-1 | conditions, such as, for example, hyperplasia, |
| | | | | expression. Exemplary assays that may be used | metaplasia, and/or dysplasia. |
| | | | | or routinely modified to measure ICAM-1 | |
| | | | | expression include assays disclosed in: Rolfe BE, | |
| | | | | et al., Atherosclerosis, 149(1): 99-110 (2000); | |
| | | | | Panettieri RA Jr, et al., unol, 154(5): 2358-2365 | |
| | | | | (1995); and, Grunstein MM, et al., Am J | |
| | | | | Physiol Lung Cell Mol Physiol, 278(6): L1154-L1163 | |
| | | | | (2000), the contents of each of which is | |
| | | | | herein incorporated by reference in its entirety. | |
| 12 | HEFEW51 | 204 | Production of | RANTES FMAT. Production of chemokines such | A highly preferred embodiment of the invention |
| | | | RANTES | as RANTES by airway epithelial cells can play a | includes a method for stimulating (e.g., increasing) |
| | | | chemokine; | significant role in the leukocyte infiltration and | RANTES production. An alternative highly preferred |
| | | | particulary in | accumulation and sensitivity to allergens in | embodiment of the invention includes a method for |
| | | | epithelial | chronic inflammation, allergy, and asthma. | inhibiting (e.g., reducing) RANTES production. |
| | | | cells, such as | Assays for immunomodulatory proteins that | Highly preferred indications include allergy, |
| | | | normal | induce chemotaxis of T cells, monocytes, and | asthma, inflammation and inflammatory disorders, |
| | | | human | eosinophils are well known in the art and may be | immunological disorders, and neoplastic disorders |
| | | | bronchial | used or routinely modified to assess the ability of | (e.g. lung cancer) such as described below under |
| | | | epitheliae. | polypeptides of the invention (including | “Cardiovascular Disorders”, “Immune Activity”, |
| | | | | antibodies and agonists or antagonists of the | “Blood-Related Disorders”, and/or |
| | | | | invention) to mediate immunomodulation, induce | “Hyperproliferative Disorders”). |
| | | | | chemotaxis, and/or mediate humoral or cell- | Preferred indications also include neoplastic |
| | | | | mediated immunity. Exemplary assays that test | diseases in other epithelial organs (e.g., prostate, |
| | | | | for immunomodulatory proteins evaluate the | breast, lung, colon, pancreatic, esophageal, stomach, |
| | | | | production of cytokines, such as RANTES, and | and urinary cancer). Other preferred indications |
| | | | | the induction of chemotactic responses in immune | include benign dysproliferative disorders and pre- |
| | | | | cells. Such assays that may be used or routinely | neoplastic conditions, such as, for example, |
| | | | | modified to test immunomodulatory activity of | hyperplasia, metaplasia, and/or dysplasia. |
| | | | | polypeptides of the invention (including | |
| | | | | antibodies and agonists or antagonists of the | |
| | | | | invention) include the assays disclosed in Miraglia | |
| | | | | et al., J Biomolecular Screening 4: 193-204 | |
| | | | | (1999); Rowland et al., “Lymphocytes: a practical | |
| | | | | approach” Chapter 6: 138-160 (2000): Cocchi et | |
| | | | | al., Science 270(5243): 1811-1815 (1995), and | |
| | | | | Robinson et al., Clin Exp Immunol 101(3): 398-407 | |
| | | | | (1995), the contents of each of which are | |
| | | | | herein incorporated by reference in its entirety. | |
| 16 | HNEMU30 | 208 | Production of | Immunoglobulin G (IgG) is the predominant | A highly preferred embodiment of the invention |
| | | | Immunoglobulin | antibody molecule circulating in normal human | includes a method for stimulating antibody (in |
| | | | G (IgG) | blood plasma. IgG is a critical component of host | particular, IgG) production. An alternative highly |
| | | | in immune | environment defenses to pathogenic challenge | preferred embodiment of the invention includes a |
| | | | cells, | (particularly following primary challenge by viral | method for inhibiting (e.g., reducing) antibody (in |
| | | | particularly | or bacterial pathogens). IgG molecules are | particular, IgG) production. |
| | | | B-cells. | produced by B-cells. B-cell maturation occurs as | Highly preferred indications include infection (e.g., |
| | | | | these cells evolve to produce IgG molecules with | an infectious disease as described below under |
| | | | | high specificity for particular pathogens (e.g., | “Infectious Disease”), immune disorders (e.g., as |
| | | | | antibodies to a particular virus). Exemplary | described below under “Immune Activity” and |
| | | | | assays that may be used or routinely modified to | “Blood-Related Disorders”). Preferred indications |
| | | | | monitor modulation of B-cell IgG production by | include autoimmune diseases (e.g., rheumatoid |
| | | | | polypeptides of the invention (including | arthritis, systemic lupus erythematosis, multiple |
| | | | | antibodies and agonists or antagonists of the | sclerosis and/or as described below), |
| | | | | invention) are well known by those of ordinary | immunodeficiencies (e.g., as described below), |
| | | | | skill in the art. Such assays are particularly useful | boosting a B-cell mediated immune response, or |
| | | | | in identifying polypeptides of the invention | suppressing a B-cell-mediated immune response. |
| | | | | (including antibodies and agonists or antagonists | Additional preferred indications include inflammation |
| | | | | of the invention) that may be used to treat | and inflammatory disorders. Highly preferred |
| | | | | infectious diseases and immune disorders. | indications also include neoplastic diseases (e.g., |
| | | | | | leukemia, lymphoma, and/or as described below |
| | | | | | under “Hyperproliferative Disorders”). Highly |
| | | | | | preferred indications include neoplasms and cancers, |
| | | | | | such as, for example, leukemia, lymphoma (e.g., T |
| | | | | | cell lymphoma, Burkitt's lymphoma, non-Hodgkins |
| | | | | | lymphoma, Hodgkin's disease), melanoma, and |
| | | | | | prostate, breast, lung, colon, pancreatic, esophageal, |
| | | | | | stomach, brain, liver and urinary cancer. Other |
| | | | | | preferred indications include benign dysproliferative |
| | | | | | disorders and pre-neoplastic conditions, such as, for |
| | | | | | example, hyperplasia, metaplasia, and/or dysplasia. |
| | | | | | Preferred indications include anemia, pancytopenia, |
| | | | | | leukopenia, thrombocytopenia, acute lymphocytic |
| | | | | | anemia (ALL), plasmacytomas, multiple myeloma, |
| | | | | | arthritis, AIDS, granulomatous disease, inflammatory |
| | | | | | bowel disease, sepsis, neutropenia, neutrophilia, |
| | | | | | psoriasis, suppression of immune reactions to |
| | | | | | transplanted organs and tissues, hemophilia, |
| | | | | | hypercoagulation, diabetes mellitus, endocarditis, |
| | | | | | meningitis, Lyme Disease, and asthma and allergy. |
| 17 | HNEMO56 | 209 | Production of Immunoglobulin | Immunoglobulin G (IgG) is the predominant | A highly preferred embodiment of the invention |
| | | | G (IgG) in immune cells, | antibody molecule circulating in normal human | includes a method for stimulating antibody (in |
| | | | particularly B-cells. | blood plasma. IgG is a critical component of host | particular, IgG) production. An alternative highly |
| | | | | environment defenses to pathogenic challenge | preferred embodiment of the invention includes a |
| | | | | (particularly following primary challenge by viral | method for inhibiting (e.g., reducing) antibody (in |
| | | | | or bacterial pathogens). IgG molecules are | particular, IgG) production. |
| | | | | produced by B-cells. B-cell maturation occurs as | Highly preferred indications include infection (e.g., |
| | | | | these cells evolve to produce IgG molecules with | an infectious disease as described below under |
| | | | | high specificity for particular pathogens (e.g., | “Infectious Disease”), immune disorders (e.g., as |
| | | | | antibodies to a particular virus). Exemplary | described below under “Immune Activity” and |
| | | | | assays that may be used or routinely modified to | “Blood-Related Disorders”). Preferred indications |
| | | | | monitor modulation of B-cell IgG production by | include autoimmune diseases (e.g., rheumatoid |
| | | | | polypeptides of the invention (including | arthritis, systemic lupus erythematosis, multiple |
| | | | | antibodies and agonists or antagonists of the | sclerosis and/or as described below), |
| | | | | invention) are well known by those of ordinary | immunodeficiencies (e.g., as described below), |
| | | | | skill in the art. Such assays are particularly useful | boosting a B-cell mediated immune response, or |
| | | | | in identifying polypeptides of the invention | suppressing a B-cell-mediated immune response. |
| | | | | (including antibodies and agonists or antagonists | Additional preferred indications include inflammation |
| | | | | of the invention) that may be used to treat | and inflammatory disorders. Highly preferred |
| | | | | infectious diseases and immune disorders. | indications also include neoplastic diseases (e.g., |
| | | | | | leukemia, lymphoma, and/or as described below |
| | | | | | under “Hyperproliferative Disorders”). Highly |
| | | | | | preferred indications include neoplasms and cancers, |
| | | | | | such as, for example, leukemia, lymphoma (e.g., T |
| | | | | | cell lymphoma, Burkitt's lymphoma, non-Hodgkins |
| | | | | | lymphoma, Hodgkin's disease), melanoma, and |
| | | | | | prostate, breast, lung, colon, pancreatic, esophageal, |
| | | | | | stomach, brain, liver and urinary cancer. Other |
| | | | | | preferred indications include benign dysproliferative |
| | | | | | disorders and pre-neoplastic conditions, such as, for |
| | | | | | example, hyperplasia, metaplasia, and/or dysplasia. |
| | | | | | Preferred indications include anemia, pancytopenia, |
| | | | | | leukopenia, thrombocytopenia, acute lymphocytic |
| | | | | | anemia (ALL), plasmacytomas, multiple myeloma, |
| | | | | | arthritis, AIDS, granulomatous disease, inflammatory |
| | | | | | bowel disease, sepsis, neutropenia, neutrophilia, |
| | | | | | psoriasis, suppression of immune reactions to |
| | | | | | transplanted organs and tissues, hemophilia, |
| | | | | | hypercoagulation, diabetes mellitus, endocarditis, |
| | | | | | meningitis, Lyme Disease, and asthma and allergy. |
| | | | Modulation | Assay to detect polypeptides of the invention | Highly preferred indications include neoplastic |
| | | | of cell | (including antibodies and agonists or antagonists | diseases (e.g., cancers of the esophagous, leukemia, |
| | | | viability in | of the invention) that induce (or repress) cell | lymphoma, and/or as described below under |
| | | | carcinoma | viability are well-known in the art and may be | “Hyperproliferative Disorders”). Highly preferred |
| | | | cells (such | used or routinely modified to assess the ability of | indications include neoplasms and cancers, such as, |
| | | | as, for | polypeptides of the invention (including | for example, leukemia, lymphoma (e.g., T cell |
| | | | example, a | antibodies and agonists or antagonists of the | lymphoma, Burkitt's lymphoma, non-Hodgkins |
| | | | human | invention) to modulate cell viability of | lymphoma, Hodgkin's disease), melanoma, and |
| | | | esophageal | transformed cell lines in vitro (e.g., human | prostate, breast, lung, colon, pancreatic, stomach, |
| | | | carcinoma | esophageal carcinoma cell lines). Agents that | brain, liver and urinary cancer. Other preferred |
| | | | cell line); | directly induce cancer cell death may be used as | indications include benign dysproliferative disorders |
| | | | more | anti-tumor therapeutics. To enhance sensitivity of | and pre-neoplastic conditions, such as, for example, |
| | | | particularly | cell viability assays, the assays may be run in | hyperplasia, metaplasia, and/or dysplasia. |
| | | | wherein | combination with a chemotherapeutic agent (e.g., | |
| | | | modulation | camptothecin). | |
| | | | of cell | | |
| | | | viability is | | |
| | | | performed in | | |
| | | | the presence | | |
| | | | of a | | |
| | | | chemotherapeutic | | |
| | | | agent | | |
| | | | (e.g., | | |
| | | | camptothecin). | | |
| 19 | HLCOY89 | 211 | Production of | IFNgamma FMAT. IFNg plays a central role in | A highly preferred embodiment of the invention |
| | | | Interferon- | the immune system and is considered to be a | includes a method for stimulating the production of |
| | | | gamma | proinflammatory cytokine. IFNg promotes TH1 | IFNg. An alternative highly preferred embodiment of |
| | | | (IFNg) by T- | and inhibits TH2 differentiation; promotes IgG2a | the invention includes a method for inhibiting the |
| | | | cells; | and inhibits IgE secretion; induces macrophage | production of IFNg. |
| | | | particularly | activation; and increases MHC expression. | Highly preferred indications include blood |
| | | | wherein | Assays for immunomodulatory proteins produced | disorders (e.g., as described below under “Immune |
| | | | IFNg | by T cells and NK cells that regulate a variety of | Activity”, “Blood-Related Disorders”, and/or |
| | | | secretion is | inflammatory activities and inhibit TH2 helper | “Cardiovascular Disorders”), and infection (e.g., viral |
| | | | modulated by | cell functions are well known in the art and may | infections, tuberculosis, infections associated with |
| | | | contact with | be used or routinely modified to assess the ability | chronic granulomatosus disease and malignant |
| | | | secreted | of polypeptides of the invention (including | osteoporosis, and/or as described below under |
| | | | proteins in | antibodies and agonists or antagonists of the | “Infectious Disease”). Highly preferred indications |
| | | | cell | invention) to mediate immunomodulation, | include autoimmune disease (e.g., rheumatoid |
| | | | supernatents | regulate inflammatory activities, modulate TH2 | arthritis, systemic lupus erythematosis, multiple |
| | | | and/or by | helper cell function, and/or mediate humoral or | sclerosis and/or as described below), |
| | | | contact with | cell-mediated immunity. Exemplary assays that | immunodeficiency (e.g., as described below), |
| | | | membrane | test for immunomodulatory proteins evaluate the | boosting a T cell-mediated immune response, and |
| | | | bound | production of cytokines, such as Interferon | suppressing a T cell-mediated immune response. |
| | | | proteins | gamma (IFNg), and the activation of T cells. | Additional highly preferred indications include |
| | | | through in | Such assays that may be used or routinely | inflammation and inflammatory disorders. Additional |
| | | | vitro cell-cell | modified to test immunomodulatory activity of | preferred indications include idiopathic pulmonary |
| | | | contact with | polypeptides of the invention (including | fibrosis. Highly preferred indications include |
| | | | cells in co- | antibodies and agonists or antagonists of the | neoplastic diseases (e.g., leukemia, lymphoma, |
| | | | culture, | invention) include the assays disclosed in Miraglia | melanoma, and/or as described below under |
| | | | wherein the | et al., J Biomolecular Screening 4: 193-204 | “Hyperproliferative Disorders”). Highly preferred |
| | | | co-cultured | (1999); Rowland et al., “Lymphocytes: a practical | indications include neoplasms and cancers, such as, |
| | | | cells express a | approach” Chapter 6: 138-160 (2000); Gonzalez et | for example, leukemia, lymphoma, melanoma, and |
| | | | costimulatory | al., J Clin Lab Anal 8(5): 225-233 (1995); Billiau | prostate, breast, lung, colon, pancreatic, esophageal, |
| | | | transmembrane | et al., Ann NY Acad Sci 856: 22-32 (1998); | stomach, brain, liver and urinary cancer. Other |
| | | | molecule. | Boehm et al., Annu Rev Immunol 15: 749-795 | preferred indications include benign dysproliferative |
| | | | | (1997), and Rheumatology (Oxford) 38(3): 214-20 | disorders and pre-neoplastic conditions, such as, for |
| | | | | (1999), the contents of each of which are herein | example, hyperplasia, metaplasia, and/or dysplasia. |
| | | | | incorporated by reference in its entirety. Human | Preferred indications include anemia, pancytopenia, |
| | | | | T cells that may be used according to these assays | leukopenia, thrombocytopenia, Hodgkin's disease, |
| | | | | may be isolated using techniques disclosed herein | acute lymphocytic anemia (ALL), plasmacytomas, |
| | | | | or otherwise known in the art. Human T cells are | multiple myeloma, Burkitt's lymphoma, arthritis, |
| | | | | primary human lymphocytes that mature in the | AIDS, granulomatous disease, inflammatory bowel |
| | | | | thymus and express a T Cell receptor and CD3, | disease, sepsis, neutropenia, neutrophilia, psoriasis, |
| | | | | CD4, or CD8. Highly preferred assays include | suppression of immune reactions to transplanted |
| | | | | those wherein IFNgamma production is tested for | organs and tissues, hemophilia, hypercoagulation, |
| | | | | modulation by secreted proteins (in cell | diabetes mellitus, endocarditis, meningitis, Lyme |
| | | | | supernatents) or by cell-cell contact with | Disease, asthma and allergy. |
| | | | | membrane bound proteins on cells in co-culture | |
| | | | | with T-cells, particularly wherein the co-cultured | |
| | | | | cells express a transmembrane costimulatory | |
| | | | | molecule. Human T-cells mediate humoral or | |
| | | | | cell-mediated immunity and may be preactivated | |
| | | | | to enhance responsiveness to immunomodulatory | |
| | | | | factors. | |
| 24 | HLEFG68 | 216 | Production of | Assays for immunomodulatory proteins produced | A highly preferred embodiment of the invention |
| | | | Tumor | by activated macrophages, T cells, fibroblasts, | includes a method for inhibiting (e.g., reducing) TNF |
| | | | Necrosis | smooth muscle, and other cell types that exert a | alpha production. An alternative highly preferred |
| | | | Factor-Alpha | wide variety of inflammatory and cytotoxic | embodiment of the invention includes a method for |
| | | | (TNFa) by | effects on a variety of cells are well known in the | stimulating (e.g., increasing) TNF alpha production. |
| | | | immune | art and may be used or routinely modified to | Highly preferred indications include blood disorders |
| | | | cells, | assess the ability of polypeptides of the invention | (e.g., as described below under “Immune Activity”, |
| | | | particularly | (including antibodies and agonists or antagonists | “Blood-Related Disorders”, and/or “Cardiovascular |
| | | | T-cells; | of the invention) to mediate inimunomodulation, | Disorders”), Highly preferred indications include |
| | | | wherein | modulate inflammation and cytotoxicity, and | autoimmune diseases (e.g., rheumatoid arthritis, |
| | | | TNFa | mediate humoral and/or cell-mediated immunity. | systemic lupus erythematosis, Crohn's disease, |
| | | | secretion is | Exemplary assays that test for immunomodulatory | multiple sclerosis and/or as described below), |
| | | | modulated by | proteins evaluate the production of cytokines such | immunodeficiencies (e.g., as described below), |
| | | | contact with | as tumor necrosis factor alpha (TNFa), and the | boosting a T cell-mediated immune response, and |
| | | | secreted | induction or inhibition of an inflammatory or | suppressing a T cell-mediated immune response. |
| | | | proteins in | cytotoxic response. Such assays that may be used | Additional highly preferred indications include |
| | | | cell | or routinely modified to test immunomodulatory | inflammation and inflammatory disorders, and |
| | | | supernatents | activity of polypeptides of the invention | treating joint damage in patients with rheumatoid |
| | | | and/or by | (including antibodies and agonists or antagonists | arthritis. An additional highly preferred indication is |
| | | | contact with | of the invention) include assays disclosed in | sepsis. Highly preferred indications include |
| | | | membrane | Miraglia et al., J Biomolecular Screening 4: 193-204 | neoplastic diseases (e.g., leukemia, lymphoma, and/or |
| | | | bound | (1999); Rowland et al., “Lymphocytes: a | as described below under “Hyperproliferative |
| | | | proteins | practical approach” Chapter 6: 138-160 (2000); | Disorders”). Additionally, highly preferred |
| | | | through in | Verhasselt et al., Eur J Immunol 28(11): 3886-3890 | indications include neoplasms and cancers, such as, |
| | | | vitro cell-cell | (1198); Dahlen et al., J Immunol | leukemia, lymphoma, melanoma, glioma (e.g., |
| | | | contact, and | 160(7): 3585-3593 (1998); Verhasselt et al., J | malignant glioma), solid tumors, and prostate, breast, |
| | | | wherein the | Immunol 158: 2919-2925 (1997); and Nardelli et | lung, colon, pancreatic, esophageal, stomach, brain, |
| | | | co-cultured | al., J Leukoc Biol 65: 822-828 (1999), the contents | liver and urinary cancer. Other preferred indications |
| | | | cells express a | of each of which are herein incorporated by | include benign dysproliferative disorders and pre- |
| | | | costimulatory | reference in its entirety. Human T cells that may | neoplastic conditions, such as, for example, |
| | | | transmembrane | be used according to these assays may be isolated | hyperplasia, metaplasia, and/or dysplasia. |
| | | | molecule. | using techniques disclosed herein or otherwise | Preferred indications include anemia, pancytopenia, |
| | | | | known in the art. Highly preferred assays include | leukopenia, thrombocytopenia, Hodgkin's disease, |
| | | | | those wherein TNFalpha production is tested for | acute lymphocytic anemia (ALL), plasmacytomas, |
| | | | | modulation by secreted proteins (in cell | multiple myeloma, Burkitt's lymphoma, arthritis, |
| | | | | supernatents) or by cell-cell contact with | asthma, AIDS, granulomatous disease, inflammatory |
| | | | | membrane bound proteins on cells in co-culture | bowel disease, neutropenia, neutrophilia, psoriasis, |
| | | | | with T-cells. Cells tested in co-culture with T- | suppression of immune reactions to transplanted |
| | | | | cells may preferably express a costimulatory | organs and tissues, hemophilia, hypercoagulation, |
| | | | | transmembrane molecule. Human T cells are | diabetes mellitus, endocarditis, meningitis, Lyme |
| | | | | primary human lymphocytes that mature in the | Disease, cardiac reperfusion injury, and asthma and |
| | | | | thymus and express a T cell receptor and CD3, | allergy. An additional preferred indication is |
| | | | | CD4, or CD8. These cells mediate humoral or | infection (e.g., an infectious disease as described |
| | | | | cell-mediated immunity and may be preactivated | below under “Infectious Disease”). |
| | | | | to enhance responsiveness to immunomodulatory | |
| | | | | factors. | |
| 24 | HLEFG68 | 216 | Modulation | Assay to detect polypeptides of the invention | Highly preferred indications include neoplastic |
| | | | of cell | (including antibodies and agonists or antagonists | diseases (e.g., cancers of the esophagous, leukemia, |
| | | | viability in | of the invention) that induce (or repress) cell | lymphoma, and/or as described below under |
| | | | carcinoma | viability are well-known in the art and may be | “Hyperproliferative Disorders”). Highly preferred |
| | | | cells (such | used or routinely modified to assess the ability of | indications include neoplasms and cancers, such as, |
| | | | as, for | polypeptides of the invention (including | for example, leukemia, lymphoma (e.g., T cell |
| | | | example, a | antibodies and agonists or antagonists of the | lymphoma, Burkitt's lymphoma, non-Hodgkins |
| | | | human | invention) to modulate cell viability of | lymphoma, Hodgkin's disease), melanoma, and |
| | | | esophageal | transformed cell lines in vitro (e.g., human | prostate, breast, lung, colon, pancreatic, stomach, |
| | | | carcinoma | esophageal carcinoma cell lines). Agents that | brain, liver and urinary cancer. Other preferred |
| | | | cell line); | directly induce cancer cell death may be used as | indications include benign dysproliferative disorders |
| | | | more | anti-tumor therapeutics. To enhance sensitivity of | and pre-neoplastic conditions, such as, for example, |
| | | | particularly | cell viability assays, the assays may be run in | hyperplasia, metaplasia, and/or dysplasia. |
| | | | wherein | combination with a chemotherapeutic agent (e.g., | |
| | | | modulation | camptothecin). | |
| | | | of cell | | |
| | | | viability is | | |
| | | | performed in | | |
| | | | the presence | | |
| | | | of a | | |
| | | | chemotherapeutic | | |
| | | | agent | | |
| | | | (e.g., | | |
| | | | camptothecin). | | |
| 28 | HECHI83 | 220 | Production of | Assays for measuring expression of VCAM are | Highly preferred indications include inflammation (acute |
| | | | VCAM in | well-known in the art and may be used or | and chronic), restnosis, atherosclerosis, asthma and |
| | | | endothelial | routinely modified to assess the ability of | allergy. Highly preferred indications include |
| | | | cells (such as | polypeptides of the invention (including | inflammation and inflammatory disorders, |
| | | | human | antibodies and agonists or antagonists of the | immunological disorders, neoplastic disorders (e.g. |
| | | | umbilical | invention) to regulate VCAM expression. For | cancer/tumorigenesis), and cardiovascular disorders |
| | | | vein | example, FMAT may be used to meaure the | (such as described below under “Immune Activity”, |
| | | | endothelial | upregulation of cell surface VCAM-1 expresssion | “Blood-Related Disorders”, “Hyperproliferative |
| | | | cells | in endothelial cells. Endothelial cells are cells | Disorders” and/or “Cardiovascular Disorders”). Highly |
| | | | (HUVEC)) | that line blood vessels, and are involved in | preferred indications include neoplasms and cancers such |
| | | | | functions that include, but are not limited to, | as, for example, leukemia, lymphoma, melanoma, renal |
| | | | | angiogenesis, vascular permeability, vascular | cell carcinoma, and prostate, breast, lung, colon, |
| | | | | tone, and immune cell extravasation. Exemplary | pancreatic, esophageal, stomach, brain, liver and urinary |
| | | | | endothelial cells that may be used according to | cancer. Other preferred indications include benign |
| | | | | these assays include human umbilical vein | dysproliferative disorders and pre-neoplastic conditions, |
| | | | | endothelial cells (HUVEC), which are available | such as, for example, hyperplasia, metaplasia, and/or |
| | | | | from commercial sources. The expression of | dysplasia. |
| | | | | VCAM (CD106), a membrane-associated protein, | |
| | | | | can be upregulated by cytokines or other factors, | |
| | | | | and contributes to the extravasation of | |
| | | | | lymphocytes, leucocytes and other immune cells | |
| | | | | from blood vessels; thus VCAM expression plays | |
| | | | | a role in promoting immune and inflammatory | |
| | | | | responses. | |
| 30 | HLCON84 | 222 | Modulation | Squalene synthtase is a key enzyme in the | A highly preferred embodiment of the invention |
| | | | of squalene - | production of liver cholesterol which is a major | includes a method for inhibiting (e.g., reducing) |
| | | | synthetase | risk factor in atherosclerosis and coronary heart | squalene synthtase production. An alternative highly |
| | | | promoter in | disease. | preferred embodiment of the invention includes a |
| | | | liver cells | Assays for the activation of the squalene - | method for stimulating (e.g., increasing) squalene |
| | | | (particularly | synthetase promoter are well-known in the art and | synthtase production. |
| | | | in liver cell | may be used or routinely modified to assess the | A highly preferred indication includes a method |
| | | | lines). | ability of polypeptides of the invention (including | for reducing cholesterol levels in blood plasma. |
| | | | | antibodies and agonists or antagonists of the | A highly preferred indication includes heart |
| | | | | invention) to regulate production of squalene | disease and cardiovascular disorders (e.g., as |
| | | | | synthetase by liver cells (natural isolates) and | described below under “Cardiovascular Disorders”). |
| | | | | liver cell lines. | A highly preferred indication includes |
| | | | | | atherosclerosis. |
| 31 | HLEFK80 | 223 | Production of | IFNgamma FMAT. IFNg plays a central role in | A highly preferred embodiment of the invention |
| | | | Interferon- | the immune system and is considered to be a | includes a method for stimulating the production of |
| | | | gamma | proinflammatory cytokine. IFNg promotes TH1 | IFNg. An alternative highly preferred embodiment of |
| | | | (IFNg) by T- | and inhibits TH2 differentiation; promotes IgG2a | the invention includes a method for inhibiting the |
| | | | cells; | and inhibits IgE secretion; induces macrophage | production of IFNg. |
| | | | particularly | activation; and increases MHC expression. | Highly preferred indications include blood |
| | | | wherein | Assays for immunomodulatory proteins produced | disorders (e.g., as described below under “Immune |
| | | | IFNg | by T cells and NK cells that regulate a variety of | Activity”, “Blood-Related Disorders”, and/or |
| | | | secretion is | inflammatory activities and inhibit TH2 helper | “Cardiovascular Disorders”), and infection (e.g., viral |
| | | | modulated by | cell functions are well known in the art and may | infections, tuberculosis, infections associated with |
| | | | contact with | be used or routinely modified to assess the ability | chronic granulomatosus disease and malignant |
| | | | secreted | of polypeptides of the invention (including | osteoporosis, and/or as described below under |
| | | | proteins in | antibodies and agonists or antagonists of the | “Infectious Disease”). Highly preferred indications |
| | | | cell | invention) to mediate immunomodulation, | include autoimmune disease (e.g., rheumatoid |
| | | | supernatents | regulate inflammatory activities, modulate TH2 | arthritis, systemic lupus erythematosis, multiple |
| | | | and/or by | helper cell function, and/or mediate humoral or | sclerosis and/or as described below), |
| | | | contact with | cell-mediated immunity. Exemplary assays that | immunodeficiency (e.g., as described below), |
| | | | membrane | test for immunomodulatory proteins evaluate the | boosting a T cell-mediated immune response, and |
| | | | bound | production of cytokines, such as Interferon | suppressing a T cell-mediated immune response. |
| | | | proteins | gamma (IFNg), and the activation of T cells. | Additional highly preferred indications include |
| | | | through in | Such assays that may be used or routinely | inflammation and inflammatory disorders. Additional |
| | | | vitro cell-cell | modified to test immunomodulatory activity of | preferred indications include idiopathic pulmonary |
| | | | contact with | polypeptides of the invention (including | fibrosis. Highly preferred indications include |
| | | | cells in co- | antibodies and agonists or antagonists of the | neoplastic diseases (e.g., leukemia, lymphoma, |
| | | | culture, | invention) include the assays disclosed in Miraglia | melanoma, and/or as described below under |
| | | | wherein the | et al., J Biomolecular Screening 4: 193-204 | “Hyperproliferative Disorders”). Highly preferred |
| | | | co-cultured | (1999); Rowland et al., “Lymphocytes: a practical | indications include neoplasms and cancers, such as, |
| | | | cells express a | approach” Chapter 6: 138-160 (2000); Gonzalez et | for example, leukemia, lymphoma, melanoma, and |
| | | | costimulatory | al., J. Clin Lab Anal 8(5): 225-233 (1995); Billiau | prostate, breast, lung, colon, pancreatic, esophageal, |
| | | | transmembrane | et al., Ann NY Acad Sci 856: 22-32 (1998); | stomach, brain, liver and urinary cancer. Other |
| | | | molecule. | Boehm et al., Annu Rev Immunol 15: 749-795 | preferred indications include benign dysproliferative |
| | | | | (1997), and Rheumatology (Oxford) 38(3): 214-20 | disorders and pre-neoplastic conditions, such as, for |
| | | | | (1999), the contents of each of which are herein | example, hyperplasia, metaplasia, and/or dysplasia. |
| | | | | incorporated by reference in its entirety. Human | Preferred indications include anemia, pancytopenia, |
| | | | | T cells that may be used according to these assays | leukopenia, thrombocytopenia, Hodgkin's disease, |
| | | | | may be isolated using techniques disclosed herein | acute lymphocytic anemia (ALL), plasmacytomas, |
| | | | | or otherwise known in the art. Human T cells are | multiple myeloma, Burkitt's lymphoma, arthritis, |
| | | | | primary human lymphocytes that mature in the | AIDS, granulomatous disease, inflammatory bowel |
| | | | | thymus and express a T Cell receptor and CD3, | disease, sepsis, neutropenia, neutrophilia, psoriasis, |
| | | | | CD4, or CD8. Highly preferred assays include | suppression of immune reactions to transplanted |
| | | | | those wherein IFNgamma production is tested for | organs and tissues, hemophilia, hypercoagulation, |
| | | | | modulation by secreted proteins (in cell | diabetes mellitus, endocarditis, meningitis, Lyme |
| | | | | supernatents) or by cell-cell contact with | Disease, asthma and allergy. |
| | | | | membrane bound proteins on cells in co-culture | |
| | | | | with T-cells, particularly wherein the co-cultured | |
| | | | | cells express a transmembrane costimulatory | |
| | | | | molecule. Human T-cells mediate humoral or | |
| | | | | cell-mediated immunity and may be preactivated | |
| | | | | to enhance responsiveness to immunomodulatory | |
| | | | | factors. | |
| 31 | HLEFK80 | 223 | Production of | MCP-1 FMAT. Assays for immunomodulatory | A highly preferred embodiment of the invention |
| | | | Monocyte | proteins that are produced by a large variety of | includes a method for stimulating (e.g., increasing) |
| | | | Chemotactic | cells and act to induce chemotaxis and activation | MCP-1 production. An alternative highly preferred |
| | | | Protein-1 | of monocytes and T cells are well known in the art | embodiment of the invention includes a method for |
| | | | (MCP-1); | and may be used or routinely modified to assess | inhibiting (e.g., reducing) MCP-1 production. |
| | | | particularly | the ability of polypeptides of the invention | Highly preferred indications include allergy, |
| | | | in endothelial | (including antibodies and agonists or antagonists | asthma, inflammation and inflammatory disorders, |
| | | | cells, such as | of the invention) to mediate immunomodulation, | immunological disorders, and neoplastic disorders |
| | | | human | induce chemotaxis, and modulate immune cell | (e.g. cancer/tumorigenesis) such as described below |
| | | | umbilical | activation. Exemplary assays that test for | under “Cardiovascular Disorders”, “Immune |
| | | | vein | immunomodulatory proteins evaluate the | Activity”, “Blood-Related Disorders”, and/or |
| | | | endothelial | production of cell surface markers, such as | “Hyperproliferative Disorders”). Highly preferred |
| | | | cells | monocyte chemoattractant protein-1 (MCP-1), | indications also include autoimmune diseases (e.g., |
| | | | (HUVEC). | and the activation of monocytes and T cells. Such | rheumatoid arthritis, systemic lupus erythematosis, |
| | | | | assays that may be used or routinely modified to | multiple sclerosis and/or as described below) and |
| | | | | test immunomodulatory and differentiation | immunodeficiencies (e.g., as described below). |
| | | | | activity of polypeptides of the invention | Preferred indications also include neoplastic |
| | | | | (including antibodies and agonists or antagonists | diseases (e.g., leukemia, lymphoma, and/or as |
| | | | | of the invention) include assays disclosed in | described below under “Hyperproliferative |
| | | | | Miraglia et al., J Biomolecular Screening 4: 193-204 | Disorders”). Highly preferred indications include |
| | | | | (1999); Rowland et al., “Lymphocytes: a | neoplasms and cancers, such as, leukemia, lymphoma, |
| | | | | practical approach” Chapter 6: 138-160 (2000); | prostate, breast, lung, colon, pancreatic, esophageal, |
| | | | | Satthaporn and Eremin, J R Coll Surg Ednb | stomach, brain, liver, and urinary cancer. Other |
| | | | | 45(1): 9-19 (2001); and Verhasselt et al., J | preferred indications include benign dysproliferative |
| | | | | Immunol 158: 2919-2925 (1997), the contents of | disorders and pre-neoplastic conditions, such as, for |
| | | | | each of which are herein incorporated by | example, hyperplasia, metaplasia, and/or dysplasia. |
| | | | | reference in its entirety. Human umbilical vein | |
| | | | | endothelial cells (HUVEC) may be used | |
| | | | | according to these assays and may be isolated | |
| | | | | using techniques readily known in the art. | |
| 33 | HLEFR48 | 225 | Production of | MCP-1 FMAT. Assays for immunomodulatory | A highly preferred embodiment of the invention |
| | | | Monocyte | proteins that are produced by a large variety of | includes a method for stimulating (e.g., increasing) |
| | | | Chemotactic | cells and act to induce chemotaxis and activation | MCP-1 production. An alternative highly preferred |
| | | | Protein-1 | of monocytes and T cells are well known in the art | embodiment of the invention includes a method for |
| | | | (MCP-1); | and may be used or routinely modified to assess | inhibiting (e.g., reducing) MCP-1 production. |
| | | | particularly | the ability of polypeptides of the invention | Highly preferred indications include allergy, |
| | | | in endothelial | (including antibodies and agonists or antagonists | asthma, inflammation and inflammatory disorders, |
| | | | cells, such as | of the invention) to mediate immunomodulation, | immunological disorders, and neoplastic disorders |
| | | | human | induce chemotaxis, and modulate immune cell | (e.g. cancer/tumorigenesis) such as described below |
| | | | umbilical | activation. Exemplary assays that test for | under “Cardiovascular Disorders”, “Immune |
| | | | vein | immunomodulatory proteins evaluate the | Activity”, “Blood-Related Disorders”, and/or |
| | | | endothelial | production of cell surface markers, such as | “Hyperproliferative Disorders”). Highly preferred |
| | | | cells | monocyte chemoattractant protein-1 (MCP-1), | indications also include autoimmune diseases (e.g., |
| | | | (HUVEC). | and the activation of monocytes and T cells. Such | rheumatoid arthritis, systemic lupus erythematosis, |
| | | | | assays that may be used or routinely modified to | multiple sclerosis and/or as described below) and |
| | | | | test immunomodulatory and differentiation | immunodeficiencies (e.g., as described below). |
| | | | | activity of polypeptides of the invention | Preferred indications also include neoplastic |
| | | | | (including antibodies and agonists or antagonists | diseases (e.g., leukemia, lymphoma, and/or as |
| | | | | of the invention) include assays disclosed in | described below under “Hyperproliferative |
| | | | | Miraglia et al., J Biomolecular Screening 4: 193-204 | Disorders”). Highly preferred indications include |
| | | | | (1999); Rowland et al., “Lymphocytes: a | neoplasms and cancers, such as, leukemia, lymphoma, |
| | | | | practical approach” Chapter 6: 138-160 (2000); | prostate, breast, lung, colon, pancreatic, esophageal, |
| | | | | Satthaporn and Eremin, J R Coll Surg Ednb | stomach, brain, liver, and urinary cancer. Other |
| | | | | 45(1): 9-19 (2001); and Verhasselt et al., J | preferred indications include benign dysproliferative |
| | | | | Immunol 158: 2919-2925 (1997), the contents of | disorders and pre-neoplastic conditions, such as, for |
| | | | | each of which are herein incorporated by | example, hyperplasia, metaplasia, and/or dysplasia. |
| | | | | reference in its entirety. Human umbilical vein | |
| | | | | endothelial cells (HUVEC) may be used | |
| | | | | according to these assays and may be isolated | |
| | | | | using techniques readily known in the art. | |
| 35 | HLEFF44 | 227 | Production of | IFNgamma FMAT. IFNg plays a central role in | A highly preferred embodiment of the invention |
| | | | Interferon- | the immune system and is considered to be a | includes a method for stimulating the production of |
| | | | gamma | proinflammatory cytokine. IFNg promotes TH1 | IFNg. An alternative highly preferred embodiment of |
| | | | (IFNg) by T- | and inhibits TH2 differentiation; promotes IgG2a | the invention includes a method for inhibiting the |
| | | | cells; | and inhibits IgE secretion; induces macrophage | production of IFNg. |
| | | | particularly | activation; and increases MHC expression. | Highly preferred indications include blood |
| | | | wherein | Assays for immunomodulatory proteins produced | disorders (e.g., as described below under “Immune |
| | | | IFNg | by T cells and NK cells that regulate a variety of | Activity”, “Blood-Related Disorders”, and/or |
| | | | secretion is | inflammatory activities and inhibit TH2 helper | “Cardiovascular Disorders”), and infection (e.g., viral |
| | | | modulated by | cell functions are well known in the art and may | infections, tuberculosis, infections associated with |
| | | | contact with | be used or routinely modified to assess the ability | chronic granulomatosus disease and malignant |
| | | | secreted | of polypeptides of the invention (including | osteoporosis, and/or as described below under |
| | | | proteins in | antibodies and agonists or antagonists of the | “Infectious Disease”). Highly preferred indications |
| | | | cell | invention) to mediate immunomodulation, | include autoimmune disease (e.g., rheumatoid |
| | | | supernatents | regulate inflammatory activities, modulate TH2 | arthritis, systemic lupus erythematosis, multiple |
| | | | and/or by | helper cell function, and/or mediate humoral or | sclerosis and/or as described below), |
| | | | contact with | cell-mediated immunity. Exemplary assays that | immunodeficiency (e.g., as described below), |
| | | | membrane | test for immunomodulatory proteins evaluate the | boosting a T cell-mediated immune response, and |
| | | | bound | production of cytokines, such as Interferon | suppressing a T cell-mediated immune response. |
| | | | proteins | gamma (IFNg), and the activation of T cells. | Additional highly preferred indications include |
| | | | through in | Such assays that may be used or routinely | inflammation and inflammatory disorders. Additional |
| | | | vitro cell-cell | modified to test immunomodulatory activity of | preferred indications include idiopathic pulmonary |
| | | | contact with | polypeptides of the invention (including | fibrosis. Highly preferred indications include |
| | | | cells in co- | antibodies and agonists or antagonists of the | neoplastic diseases (e.g., leukemia, lymphoma, |
| | | | culture, | invention) include the assays disclosed in Miraglia | melanoma, and/or as described below under |
| | | | wherein the | et al., J Biomolecular Screening 4: 193-204 | “Hyperproliferative Disorders”). Highly preferred |
| | | | co-cultured | (1999); Rowland et al., “Lymphocytes: a practical | indications include neoplasms and cancers, such as, |
| | | | cells express a | approach” Chapter 6: 138-160 (2000); Gonzalez et | for example, leukemia, lymphoma, melanoma, and |
| | | | costimulatory | al., J Clin Lab Anal 8(5): 225-233 (1995); Billiau | prostate, breast, lung, colon, pancreatic, esophageal, |
| | | | transmembrane | et at., Ann NY Acad Sci 856: 22-32 (1998); | stomach, brain, liver and urinary cancer. Other |
| | | | molecule. | Boehm et al., Annu Rev Immunol 15: 749-795 | preferred indications include benign dysproliferative |
| | | | | (1997), and Rheumatology (Oxford) 38(3): 214-20 | disorders and pre-neoplastic conditions, such as, for |
| | | | | (1999), the contents of each of which are herein | example, hyperplasia, metaplasia, and/or dysplasia. |
| | | | | incorporated by reference in its entirety. Human | Preferred indications include anemia, pancytopenia, |
| | | | | T cells that may be used according to these assays | leukopenia, thrombocytopenia, Hodgkin's disease, |
| | | | | may be isolated using techniques disclosed herein | acute lymphocytic anemia (ALL), plasmacytomas, |
| | | | | or otherwise known in the art. Human T cells are | multiple myeloma, Burkitt's lymphoma, arthritis, |
| | | | | primary human lymphocytes that mature in the | AIDS, granulomatous disease, inflammatory bowel |
| | | | | thymus and express a T Cell receptor and CD3, | disease, sepsis, neutropenia, neutrophilia, psoriasis, |
| | | | | CD4, or CD8. Highly preferred assays include | suppression of immune reactions to transplanted |
| | | | | those wherein IFNgamma production is tested for | organs and tissues, hemophilia, hypercoagulation, |
| | | | | modulation by secreted proteins (in cell | diabetes mellitus, endocarditis, meningitis, Lyme |
| | | | | supernatents) or by cell-cell contact with | Disease, asthma and allergy. |
| | | | | membrane bound proteins on cells in co-culture | |
| | | | | with T-cells, particularly wherein the co-cultured | |
| | | | | cells express a transmembrane costimulatory | |
| | | | | molecule. Human T-cells mediate humoral or | |
| | | | | cell-mediated immunity and may be preactivated | |
| | | | | to enhance responsiveness to immunomodulatory | |
| | | | | factors. | |
| 37 | HLEFV31 | 229 | Production of | Immunoglobulin G (IgG) is the predominant | A highly preferred embodiment of the invention |
| | | | Immunoglobulin | antibody molecule circulating in normal human | includes a method for stimulating antibody (in |
| | | | G (IgG) | blood plasma. IgG is a critical component of host | particular, IgG) production. An alternative highly |
| | | | in immune | environment defenses to pathogenic challenge | preferred embodiment of the invention includes a |
| | | | cells, | (particularly following primary challenge by viral | method for inhibiting (e.g., reducing) antibody (in |
| | | | particularly | or bacterial pathogens). IgG molecules are | particular, IgG) production. |
| | | | B-cells. | produced by B-cells. B-cell maturation occurs as | Highly preferred indications include infection (e.g., |
| | | | | these cells evolve to produce IgG molecules with | an infectious disease as described below under |
| | | | | high specificity for particular pathogens (e.g., | “Infectious Disease”), immune disorders (e.g., as |
| | | | | antibodies to a particular virus). Exemplary | described below under “Immune Activity” and |
| | | | | assays that may be used or routinely modified to | “Blood-Related Disorders”). Preferred indications |
| | | | | monitor modulation of B-cell IgG production by | include autoimmune diseases (e.g., rheumatoid |
| | | | | polypeptides of the invention (including | arthritis, systemic lupus erythematosis, multiple |
| | | | | antibodies and agonists or antagonists of the | sclerosis and/or as described below), |
| | | | | invention) are well known by those of ordinary | immunodeficiencies (e.g., as described below), |
| | | | | skill in the art. Such assays are particularly useful | boosting a B-cell mediated immune response, or |
| | | | | in identifying polypeptides of the invention | suppressing a B-cell-mediated immune response. |
| | | | | (including antibodies and agonists or antagonists | Additional preferred indications include inflammation |
| | | | | of the invention) that may be used to treat | and inflammatory disorders. Highly preferred |
| | | | | infectious diseases and immune disorders. | indications also include neoplastic diseases (e.g., |
| | | | | | leukemia, lymphoma, and/or as described below |
| | | | | | under “Hyperproliferative Disorders”). Highly |
| | | | | | preferred indications include neoplasms and cancers, |
| | | | | | such as, for example, leukemia, lymphoma (e.g., T |
| | | | | | cell lymphoma, Burkitt's lymphoma, non-Hodgkins |
| | | | | | lymphoma, Hodgkin's disease), melanoma, and |
| | | | | | prostate, breast, lung, colon, pancreatic, esophageal, |
| | | | | | stomach, brain, liver and urinary cancer. Other |
| | | | | | preferred indications include benign dysproliferative |
| | | | | | disorders and pre-neoplastic conditions, such as, for |
| | | | | | example, hyperplasia, metaplasia, and/or dysplasia. |
| | | | | | Preferred indications include anemia, pancytopenia, |
| | | | | | leukopenia, thrombocytopenia, acute lymphocytic |
| | | | | | anemia (ALL), plasmacytomas, multiple myeloma, |
| | | | | | arthritis, AIDS, granulomatous disease, inflammatory |
| | | | | | bowel disease, sepsis, neutropenia, neutrophilia, |
| | | | | | psoriasis, suppression of immune reactions to |
| | | | | | transplanted organs and tissues, hemophilia, |
| | | | | | hypercoagulation, diabetes mellitus, endocarditis, |
| | | | | | meningitis, Lyme Disease, and asthma and allergy. |
| 46 | HEDBH12 | 238 | Activation of | Assays for activation of transcription through the | A highly preferred embodiment of the invention |
| | | | transcription | Serum Response Element (SRE) are well-known | includes a method for stimulating immune cell |
| | | | through | in the art and may be used or routinely modified | proliferation (e.g., T-cells). An alternative highly |
| | | | serum | to assess the ability of polypeptides of the | preferred embodiment of the invention includes a |
| | | | response | invention (including antibodies and agonists or | method for inhibiting immune cell proliferation (e.g., |
| | | | element | antagonists of the invention) to regulate the serum | T-cells). |
| | | | (SRE) in | response factors and modulate the expression of | A highly preferred embodiment of the invention |
| | | | epithelial | genes involved in growth. Exemplary assays for | includes a method for activating immune cells. An |
| | | | cells. | transcription through the SRE that may be used or | alternative highly preferred embodiment of the |
| | | | | routinely modified to test SRE activity of the | invention includes a method for inhibiting the |
| | | | | polypeptides of the invention (including | activation of and/or inactivating immune cells. |
| | | | | antibodies and agonists or antagonists of the | Additional highly preferred indications include |
| | | | | invention) include assays disclosed in Berger et | inflammation and inflammatory disorders, and |
| | | | | al., Gene 66: 1-10 (1998); Cullen and Malm, | immune disorders as described below under “Immune |
| | | | | Methods in Enzymol 216: 362-368 (1992); | Activity” and “Blood-Related disorders”. |
| | | | | Henthorn et al., Proc Natl Acad Sci USA 85: 6342-6346 | Highly preferred indications include autoimmune |
| | | | | (1988); and Black et al., Virus Genes | diseases (e.g., rheumatoid arthritis, systemic lupus |
| | | | | 12(2): 105-117 (1997), the content of each of | erythematosis, multiple sclerosis and/or as described |
| | | | | which are herein incorporated by reference in its | below), immunodeficiencies (e.g., as described |
| | | | | entirety. Epithelial cells that may be used | below), boosting a T cell-mediated immune response, |
| | | | | according to these assays are publicly available | and suppressing a T cell-mediated immune response. |
| | | | | (e.g., through the ATCC) and/or may be routinely | An additional highly preferred indication includes |
| | | | | generated. Polypeptides of the invention | infection (e.g., AIDS, and/or as described below under |
| | | | | (including antibodies and agonists or antagonists | “Infectious Disease”). |
| | | | | of the invention) that modulate SRE activation | Highly preferred indications include neoplastic |
| | | | | may be important for inflammation, and bacterial | diseases (e.g., melanoma, renal cell carcinoma, |
| | | | | and viral infection. | leukemia, lymphoma, and/or as described below |
| | | | | | under “Hyperproliferative Disorders”). Highly |
| | | | | | preferred indications include neoplasms and cancers, |
| | | | | | such as, for example, melanoma (e.g., metastatic |
| | | | | | melanoma), renal cell carcinoma (e.g., metastatic |
| | | | | | renal cell carcinoma), leukemia, lymphoma (e.g., T |
| | | | | | cell lymphoma), and prostate, breast, lung, colon, |
| | | | | | pancreatic, esophageal, stomach, brain, liver and |
| | | | | | urinary cancer. Other preferred indications include |
| | | | | | benign dysproliferative disorders and pre-neoplastic |
| | | | | | conditions, such as, for example, hyperplasia, |
| | | | | | metaplasia, and/or dysplasia. |
| | | | | | A highly preferred indication is infection (e.g., |
| | | | | | tuberculosis, infections associated with granulomatous |
| | | | | | disease, and osteoporosis, and/or an infectious disease |
| | | | | | as described below under “Infectious Disease”). A |
| | | | | | highly preferred indication is AIDS. |
| | | | | | Additional highly preferred indications include |
| | | | | | suppression of immune reactions to transplanted |
| | | | | | organs and/or tissues, uveitis, psoriasis, and tropical |
| | | | | | spastic paraparesis. |
| | | | | | Preferred indications also include anemia, |
| | | | | | pancytopenia, leukopenia, thrombocytopenia, |
| | | | | | Hodgkin's disease, acute lymphocytic anemia (ALL), |
| | | | | | plasmacytomas, multiple myeloma, Burkitt's |
| | | | | | lymphoma, arthritis, granulomatous disease, |
| | | | | | inflammatory bowel disease, sepsis, neutropenia, |
| | | | | | neutrophilia, hemophilia, hypercoagulation, diabetes |
| | | | | | mellitus, endocarditis, meningitis, Lyme Disease, |
| | | | | | asthma and allergy. |
| 57 | HECHQ69 | 249 | Production of | Vascular endothelial growth factor (VEGF) is | Highly preferred indications include neoplastic |
| | | | Vascular | strong promoter of angiogenesis, the growth of | diseases wherein angiogenesis promotes disease |
| | | | Endothelial | new blood vessels from pre-existing vessels, | progression (e.g., solid tumor cancers including but |
| | | | Growth | which can contribute to the development of | not limited to melanoma, prostate, breast, lung, |
| | | | Factor | numerous types of tumors, and the formation of | pancreatic, esophageal, stomach, brain, liver and |
| | | | (VEGF), | metastases. In order to grow, tumors need new | urinary tract cancers, and/or as described below under |
| | | | particularly | blood vessels to form so that they can feed | “Hyperproliferative Disorders”). Other preferred |
| | | | in colon | themselves. Control of tumor angiogenesis is a | indications include benign dysproliferative disorders |
| | | | carcinoma | prime therapeutic target for cancer therapy. | and pre-neoplastic conditions, such as, for example, |
| | | | cell lines. | Assays to detect polypeptides of the invention | hyperplasia, metaplasia, and/or dysplasia. |
| | | | | (including antibodies and agonists or antagonists | |
| | | | | of the invention) that induce (or repress) VEGF | |
| | | | | production are well-known in the art and may be | |
| | | | | used or routinely modified to assess the ability of | |
| | | | | polypeptides of the invention (including | |
| | | | | antibodies and agonists or antagonists of the | |
| | | | | invention) to modulate VEGF production in vitro | |
| | | | | (e.g., colon carcinoma cell lines). | |
| 58 | HECJN68 | 250 | Production of | Assays for measuring expression of VCAM are | Highly preferred indications include inflammation (acute |
| | | | VCAM in | well-known in the art and may be used or | and chronic), restnosis, atherosclerosis, asthma and |
| | | | endothelial | routinely modified to assess the ability of | allergy. Highly preferred indications include |
| | | | cells (such as | polypeptides of the invention (including | inflammation and inflammatory disorders, |
| | | | human | antibodies and agonists or antagonists of the | immunological disorders, neoplastic disorders (e.g. |
| | | | umbilical | invention) to regulate VCAM expression. For | cancer/tumorigenesis), and cardiovascular disorders |
| | | | vein | example, FMAT may be used to meaure the | (such as described below under “Immune Activity”, |
| | | | endothelial | upregulation of cell surface VCAM-1 expresssion | “Blood-Related Disorders”, “Hyperproliferative |
| | | | cells | in endothelial cells. Endothelial cells are cells | Disorders” and/or “Cardiovascular Disorders”). Highly |
| | | | (HUVEC)) | that line blood vessels, and are involved in | preferred indications include neoplasms and cancers such |
| | | | | functions that include, but are not limited to, | as, for example, leukemia, lymphoma, melanoma, renal |
| | | | | angiogenesis, vascular permeability, vascular | cell carcinoma, and prostate, breast, lung, colon, |
| | | | | tone, and immune cell extravasation. Exemplary | pancreatic, esophageal, stomach, brain, liver and urinary |
| | | | | endothelial cells that may be used according to | cancer. Other preferred indications include benign |
| | | | | these assays include human umbilical vein | dysproliferative disorders and pre-neoplastic conditions, |
| | | | | endothelial cells (HUVEC), which are available | such as, for example, hyperplasia, metaplasia, and/or |
| | | | | from commercial sources. The expression of | dysplasia. |
| | | | | VCAM (CD106), a membrane-associated protein, | |
| | | | | can be upregulated by cytokines or other factors, | |
| | | | | and contributes to the extravasation of | |
| | | | | lymphocytes, leucocytes and other immune cells | |
| | | | | from blood vessels; thus VCAM expression plays | |
| | | | | a role in promoting immune and inflammatory | |
| | | | | responses. | |
| 59 | HEFJO40 | 251 | Modulation | CXCR4 is a G-protein-coupled, 7-transmembrane | Highly preferred indications include neoplastic |
| | | | of CXCR4 | domain receptor thought to play a critical role in | diseases (e.g., as described below under |
| | | | expression; | motility, homing and proliferation of cancer cells | “Hyperproliferative Disorders”), blood disorders (e.g., |
| | | | particularly | at specific metastatic sites. CXCR4 is also is a | as described below under “Immune Activity” and/or |
| | | | in | major co-receptor for T-cell-tropic HIV-1 strains, | “Blood-Related Disorders”), immune disorders (e.g., |
| | | | transformed | and thus an important mediator of cell | as described below under “Immune Activity”) and |
| | | | cells, e.g., | entry/infection by HIV. Exemplary assays that | infections (e.g., as described below under “Infectious |
| | | | such as | may be used or routinely modified to monitor | Disease”), particularly HIV infection. |
| | | | fibrosarcoma | modulation of CXCR4 expression by polypeptides | Highly preferred indications also include |
| | | | cell lines. | of the invention (including antibodies and agonists | autoimmune diseases (e.g., rheumatoid arthritis, |
| | | | | or antagonists of the invention) are well known by | systemic lupus erythematosis, multiple sclerosis |
| | | | | those of ordinary skill in the art. In particular, | and/or as described below) and immunodeficiencies |
| | | | | assays that measure modulation of CXCR4 | (e.g., as described below). Additional highly |
| | | | | expression in transformed cells, such as | preferred indications include inflammation and |
| | | | | fibrosarcoma cells, are useful for identification of | inflammatory disorders. Highly preferred |
| | | | | polypeptides (including antibodies and agonists or | indications also include cancers such as, kidney, |
| | | | | antagonists of the invention) which may be used | melanoma, prostate, breast, lung, colon, pancreatic, |
| | | | | in treatment of cancer and other neoplasias. | esophageal, stomach, brain, liver, urinary cancer, |
| | | | | Similarly, assays that measure modulation of | lymphoma and leukemias. Other preferred indications |
| | | | | CXCR4 expression in immune cells, such as T- | include benign dysproliferative disorders and pre- |
| | | | | cells, are useful for identification of polypeptides | neoplastic conditions, such as, for example, |
| | | | | (including antibodies and agonists or antagonists | hyperplasia, metaplasia, and/or dysplasia. Other |
| | | | | of the invention) which may be used in treatment | highly preferred indications include, pancytopenia, |
| | | | | of HIV/AIDS. | leukopenia, leukemias, Hodgkin's disease, acute |
| | | | | | lymphocytic anemia (ALL), arthritis, asthma, |
| | | | | | HIV/AIDS, granulomatous disease, inflammatory |
| | | | | | bowel disease, sepsis, psoriasis, immune reactions to |
| | | | | | transplanted organs and tissues, endocarditis, |
| | | | | | meningitis, Lyme Disease, and allergies. |
| 60 | HEGLK47 | 252 | Modulation | Caspase Apoptosis. Assays for caspase apoptosis | A highly preferred embodiment of the invention |
| | | | of caspase | are well known in the art and may be used or | includes a method for stimulating apoptosis in |
| | | | activity; | routinely modified to assess the ability of | transformed, cancerous, or tumorigenic cells. An |
| | | | particularly | polypeptides of the invention (including | alternative highly preferred embodiment of the |
| | | | in | antibodies and agonists or antagonists of the | invention includes a method for inhibiting (e.g., |
| | | | transformed | invention) to promote or prevent caspase protease- | decreasing) apoptosis of normal cells (e.g., such to |
| | | | cells such as | mediated apoptosis. Assays monitoring induction | increase the half-life of cells such as immune cells |
| | | | colon cancer | of apoptosis in transformed cells (such as a colon | (e.g., B-cells) in conditions wherein there is an |
| | | | cell lines, | cancer cell lines) is particularly valuable for | immune cell population deficiency). |
| | | | more | identifying polypeptides useful for treating | Highly preferred indications include neoplastic |
| | | | particularly | neoplasia. These assays may preferentially be | diseases (e.g., as described below under |
| | | | wherein | performed in the presence of a chemotherapeutic | “Hyperproliferative Disorders”), and disorders of the |
| | | | modulation | agent (e.g., camptothecin) to enhance assay | immune and hematopoietic system (e.g., such as |
| | | | of caspase | sensitivity. Exemplary assays for caspase | described below under “Immune Activity”, and |
| | | | activity is | apoptosis that may be used or routinely modified | “Blood-Related Disorders). Preferred indications |
| | | | performed in | to test caspase apoptosis activity of polypeptides | include autoimmune diseases (e.g., rheumatoid |
| | | | the presence | of the invention (including antibodies and agonists | arthritis, systemic lupus erythematosis, multiple |
| | | | of a | or antagonists of the invention) include the assays | sclerosis and/or as described below) and |
| | | | chemotherapeutic | disclosed in Lee et al., FEBS Lett 485(2-3): 122-126 | immunodeficiencies (e.g., as described below). |
| | | | agent | (2000); Nor et al., J Vasc Res 37(3): 209-218 | Additional preferred indications include inflammation |
| | | | (e.g., | (2000); and Karsan and Harlan, J Atheroscler | and inflammatory disorders (such as acute and chronic |
| | | | camptothecin). | Thromb 3(2): 75-80 (1996); the contents of each | inflammatory diseases, e.g., inflammatory bowel |
| | | | | of which are herein incorporated by reference in | disease and Crohn's disease). |
| | | | | its entirety. Endothelial cells that may be used | |
| | | | | according to these assays are publicly available | |
| | | | | (e.g., through commercial sources). | |
| 61 | HEDDJ18 | 253 | Activation of | Assays for activation of transcription through the | A highly preferred embodiment of the invention |
| | | | transcription | Serum Response Element (SRE) are well-known | includes a method for stimulating immune cell |
| | | | through | in the art and may be used or routinely modified | proliferation (e.g., T-cells). An alternative highly |
| | | | serum | to assess the ability of polypeptides of the | preferred embodiment of the invention includes a |
| | | | response | invention (including antibodies and agonists or | method for inhibiting immune cell proliferation (e.g., |
| | | | element | antagonists of the invention) to regulate the serum | T-cells). |
| | | | (SRE) in | response factors and modulate the expression of | A highly preferred embodiment of the invention |
| | | | epithelial | genes involved in growth. Exemplary assays for | includes a method for activating immune cells. An |
| | | | cells. | transcription through the SRE that may be used or | alternative highly preferred embodiment of the |
| | | | | routinely modified to test SRE activity of the | invention includes a method for inhibiting the |
| | | | | polypeptides of the invention (including | activation of and/or inactivating immune cells. |
| | | | | antibodies and agonists or antagonists of the | Additional highly preferred indications include |
| | | | | invention) include assays disclosed in Berger et | inflammation and inflammatory disorders, and |
| | | | | al., Gene 66: 1-10 (1998); Cullen and Malm, | immune disorders as described below under “Immune |
| | | | | Methods in Enzymol 216: 362-368 (1992); | Activity” and “Blood-Related disorders”. |
| | | | | Henthorn et al., Proc Natl Acad Sci USA 85: 6342-6346 | Highly preferred indications include autoimmune |
| | | | | (1988); and Black et al., Virus Genes | diseases (e.g., rheumatoid arthritis, systemic lupus |
| | | | | 12(2): 105-117 (1997), the content of each of | erythematosis, multiple sclerosis and/or as described |
| | | | | which are herein incorporated by reference in its | below), immunodeficiencies (e.g., as described |
| | | | | entirety. Epithelial cells that may be used | below), boosting a T cell-mediated immune response, |
| | | | | according to these assays are publicly available | and suppressing a T cell-mediated immune response. |
| | | | | (e.g., through the ATCC) and/or may be routinely | An additional highly preferred indication includes |
| | | | | generated. Polypeptides of the invention | infection (e.g., AIDS, and/or as described below under |
| | | | | (including antibodies and agonists or antagonists | “Infectious Disease”). |
| | | | | of the invention) that modulate SRE activation | Highly preferred indications include neoplastic |
| | | | | may be important for inflammation; and bacterial | diseases (e.g., melanoma, renal cell carcinoma, |
| | | | | and viral infection. | leukemia, lymphoma, and/or as described below |
| | | | | | under “Hyperproliferative Disorders”). Highly |
| | | | | | preferred indications include neoplasms and cancers, |
| | | | | | such as, for example, melanoma (e.g., metastatic |
| | | | | | melanoma), renal cell carcinoma (e.g., metastatic |
| | | | | | renal cell carcinoma), leukemia, lymphoma (e.g., T |
| | | | | | cell lymphoma), and prostate, breast, lung, colon, |
| | | | | | pancreatic, esophageal, stomach, brain, liver and |
| | | | | | urinary cancer. Other preferred indications include |
| | | | | | benign dysproliferative disorders and pre-neoplastic |
| | | | | | conditions, such as, for example, hyperplasia, |
| | | | | | metaplasia, and/or dysplasia. |
| | | | | | A highly preferred indication is infection (e.g., |
| | | | | | tuberculosis, infections associated with granulomatous |
| | | | | | disease, and osteoporosis, and/or an infectious disease |
| | | | | | as described below under “Infectious Disease”). A |
| | | | | | highly preferred indication is AIDS. |
| | | | | | Additional highly preferred indications include |
| | | | | | suppression of immune reactions to transplanted |
| | | | | | organs and/or tissues, uveitis, psoriasis, and tropical |
| | | | | | spastic paraparesis. |
| | | | | | Preferred indications also include anemia, |
| | | | | | pancytopenia, leukopenia, thrombocytopenia, |
| | | | | | Hodgkin's disease, acute lymphocytic anemia (ALL), |
| | | | | | plasmacytomas, multiple myeloma, Burkitt's |
| | | | | | lymphoma, arthritis, granulomatous disease, |
| | | | | | inflammatory bowel disease, sepsis, neutropenia, |
| | | | | | neutrophilia, hemophilia, hypercoagulation, diabetes |
| | | | | | mellitus, endocarditis, meningitis, Lyme Disease, |
| | | | | | asthma and allergy. |
| 61 | HEDDJ18 | 253 | Production of | IL-4 is produced at elevated levels in the | A highly preferred embodiment of the invention |
| | | | IL-4, | asthmatic lung and is one of the central regulators | includes a method for stimulating (e.g., increasing) |
| | | | particularly | of many of the hallmark features of asthma and | IL-4 production. An alternative highly preferred |
| | | | in immune | allergy diseases. | embodiment of the invention includes a method for |
| | | | cells such as | Human T cells are primary human | inhibiting (e.g., reducing) IL-4 production. |
| | | | T-cells | lymphocytes that mature in the thymus and | A highly preferred indication includes asthma. |
| | | | (including | express a T cell receptor and CD3, CD4, or CD8. | A highly preferred indication includes allergy. |
| | | | natural | These cells mediate humoral or cell-mediated | A highly preferred indication includes rhinitis. |
| | | | isolates or T- | immunity and may be preactivated to enhance | Additional highly preferred indications include |
| | | | cell lines). | responsiveness to immunomodulatory factors. | inflammation and inflammatory disorders. |
| | | | | Assays to monitor modulation of the IL-4 | Highly preferred indications include neoplastic |
| | | | | promoter and IL-4 gene transcription/translation | diseases (e.g., leukemia, lymphoma, melanoma, |
| | | | | are well-known in the art and may be used or | and/or as described below under “Hyperproliferative |
| | | | | routinely modified to assess the ability of | Disorders”). Preferred indications include neoplasms |
| | | | | polypeptides of the invention (including | and cancers, such as, for example, leukemia, |
| | | | | antibodies and agonists or antagonists of the | lymphoma, melanoma, and prostate, breast, lung, |
| | | | | invention) to regulate IL-4 production and | colon, pancreatic, esophageal, stomach, brain, liver |
| | | | | modulate expression of genes involved in immune | and urinary cancer. Other preferred indications |
| | | | | cell responses. | include benign dysproliferative disorders and pre- |
| | | | | Furthermore, assays for immunomodulatory | neoplastic conditions, such as, for example, |
| | | | | proteins secreted by TH2 cells (such as IL-4) that | hyperplasia, metaplasia, and/or dysplasia. |
| | | | | stimulate B cells, T cells, macrophages and mast | Preferred indications include blood disorders (e.g., |
| | | | | cells and promote polarization of CD4+ cells into | as described below under “Immune Activity”, “Blood- |
| | | | | TH2 cells are well known in the art and may be | Related Disorders”, and/or “Cardiovascular |
| | | | | used or routinely modified to assess the ability of | Disorders”). Preferred indications include |
| | | | | polypeptides of the invention (including | autoimmune diseases (e.g., rheumatoid arthritis, |
| | | | | antibodies and agonists or antagonists of the | systemic lupus erythematosis, multiple sclerosis |
| | | | | invention) to mediate immunomodulation, | and/or as described below) and immunodeficiencies |
| | | | | stimulate immune cells, modulate immune cell | (e.g., as described below). |
| | | | | polarization, and/or mediate humoral or cell- | Preferred indications include anemia, |
| | | | | mediated immunity. Exemplary assays that test | pancytopenia, leukopenia, thrombocytopenia, |
| | | | | for immunomodulatory proteins evaluate the | Hodgkin's disease, acute lymphocytic anemia (ALL), |
| | | | | production of cytokines, such as IL-4, and the | plasmacytomas, multiple myeloma, Burkitt's |
| | | | | stimulation of immune cells, such as B cells, T | lymphoma, arthritis, AIDS, granulomatous disease, |
| | | | | cells, macrophages and mast cells. Such assays | inflammatory bowel disease, sepsis, neutropenia, |
| | | | | that may be used or routinely modified to test | neutrophilia, psoriasis, suppression of immune |
| | | | | immunomodulatory activity of polypeptides of the | reactions to transplanted organs and tissues, |
| | | | | invention (including antibodies and agonists or | hemophilia, hypercoagulation, diabetes mellitus, |
| | | | | antagonists of the invention) include the assays | endocarditis, meningitis, and Lyme Disease. |
| | | | | disclosed in Miraglia et al., J Biomolecular | An additional preferred indication is infection (e.g., |
| | | | | Screening 4: 193-204 (1999); Rowland et al., | an infectious disease as described below under |
| | | | | “Lymphocytes: a practical approach” Chapter | “Infectious Disease”). |
| | | | | 6: 138-160 (2000); Gonzalez et al., J Clin Lab | |
| | | | | Anal 8(5): 277-283 (1194); Yssel et al., Res | |
| | | | | Immunol 144(8): 610-616 (1993); Bagley et al., | |
| | | | | Nat Immunol 1(3): 257-261 (2000); and van der | |
| | | | | Graaff et al., Rheumatology (Oxford) 38(3): 214-220 | |
| | | | | (1999), the contents of each of which are | |
| | | | | herein incorporated by reference in its entirety. | |
| | | | | Human T cells that may be used according to | |
| | | | | these assays may be isolated using techniques | |
| | | | | disclosed herein or otherwise known in the art. | |
| 64 | HMFHI61 | 256 | Modulation | CXCR4 is a G-protein-coupled, 7-transmembrane | Highly preferred indications include neoplastic |
| | | | of CXCR4 | domain receptor thought to play a critical role in | diseases (e.g., as described below under |
| | | | expression; | motility, homing and proliferation of cancer cells | “Hyperproliferative Disorders”), blood disorders (e.g., |
| | | | particularly | at specific metastatic sites. CXCR4 is also is a | as described below under “Immune Activity” and/or |
| | | | in | major co-receptor for T-cell-tropic HIV-1 strains, | “Blood-Related Disorders”), immune disorders (e.g., |
| | | | transformed | and thus an important mediator of cell | as described below under “Immune Activity”) and |
| | | | cells, e.g., | entry/infection by HIV. Exemplary assays that | infections (e.g., as described below under “Infectious |
| | | | such as | may be used or routinely modified to monitor | Disease”), particularly HIV infection. |
| | | | fibrosarcoma | modulation of CXCR4 expression by polypeptides | Highly preferred indications also include |
| | | | cell lines. | of the invention (including antibodies and agonists | autoimmune diseases (e.g., rheumatoid arthritis, |
| | | | | or antagonists of the invention) are well known by | systemic lupus erythematosis, multiple sclerosis |
| | | | | those of ordinary skill in the art. In particular, | and/or as described below) and immunodeficiencies |
| | | | | assays that measure modulation of CXCR4 | (e.g., as described below). Additional highly |
| | | | | expression in transformed cells, such as | preferred indications include inflammation and |
| | | | | fibrosarcoma cells, are useful for identification of | inflammatory disorders. Highly preferred |
| | | | | polypeptides (including antibodies and agonists or | indications also include cancers such as, kidney, |
| | | | | antagonists of the invention) which may be used | melanoma, prostate, breast, lung, colon, pancreatic, |
| | | | | in treatment of cancer and other neoplasias. | esophageal, stomach, brain, liver, urinary cancer, |
| | | | | Similarly, assays that measure modulation of | lymphoma and leukemias. Other preferred indications |
| | | | | CXCR4 expression in immune cells, such as T- | include benign dysproliferative disorders and pre- |
| | | | | cells, are useful for identification of polypeptides | neoplastic conditions, such as, for example, |
| | | | | (including antibodies and agonists or antagonists | hyperplasia, metaplasia, and/or dysplasia. Other |
| | | | | of the invention) which may be used in treatment | highly preferred indications include, pancytopenia, |
| | | | | of HIV/AIDS. | leukopenia, leukemias, Hodgkin's disease, acute |
| | | | | | lymphocytic anemia (ALL), arthritis, asthma, |
| | | | | | HIV/AIDS, granulomatous disease, inflammatory |
| | | | | | bowel disease, sepsis, psoriasis, immune reactions to |
| | | | | | transplanted organs and tissues, endocarditis, |
| | | | | | meningitis, Lyme Disease, and allergies. |
| 65 | HEHNH91 | 257 | Production of | IL-2, FMAT. IL-2 is the principal T cell factor | A highly preferred embodiment of the invention |
| | | | IL-2 and | that allows T cell expansion and differentiation | includes a method for stimulating IL-2 production. An |
| | | | activation of | into effector cells. Assays for immunomodulatory | alternative highly preferred embodiment of the |
| | | | T cells; | proteins secreted by T cells that promote T cell | invention includes a method for inhibiting (e.g., |
| | | | particularly | and NK cell growth and differentiation are well | reducing) IL-2 production. |
| | | | wherein IL-2 | known in the art and may be used or routinely | A highly preferred embodiment of the invention |
| | | | secretion is | modified to assess the ability of polypeptides of | includes a method for stimulating T cell expansion. |
| | | | modulated by | the invention (including antibodies and agonists or | An alternative highly preferred embodiment of the |
| | | | contact with | antagonists of the invention) to mediate | invention includes a method for inhibiting T cell |
| | | | secreted | immunomodulation, promote immune cell growth | expansion. |
| | | | proteins in | and differentiation, and/or mediate humoral or | A highly preferred embodiment of the invention |
| | | | cell | cell-mediated immunity. Exemplary assays that | includes a method for stimulating T cell |
| | | | supernatents | test for immunomodulatory proteins evaluate the | differentiation. In a specific embodiment, this method |
| | | | and/or by | production of cytokines, such as IL-2, and the | stimulates T cell differentiation into effector cells. An |
| | | | contact with | activation of T cells. Such assays that may be | alternative highly preferred embodiment of the |
| | | | membrane | used or routinely modified to test | invention includes a method for inhibiting T cell |
| | | | bound | immunomodulatory activity of polypeptides of the | differentiation. In a specific embodiment, this method |
| | | | proteins | invention (including antibodies and agonists or | inhibits the differentiation of T cells into effector |
| | | | through in | antagonists of the invention) include the assays | cells. |
| | | | vitro cell-cell | disclosed in Miraglia et al., J Biomolecular | Highly preferred indications include neoplastic |
| | | | contact with | Screening 4: 193-204 (1999); Rowland et al., | diseases (e.g., melanoma, renal cell carcinoma, |
| | | | cells in co- | “Lymphocytes: a practical approach” Chapter | leukemia, lymphoma, and/or as described below |
| | | | culture, | 6: 138-160 (2000); Laduda et al., Immunology | under “Hyperproliferative Disorders”). Highly |
| | | | wherein the | 94(4): 496-502 (1998); and Powell et al., Immunol | preferred indications include neoplasms, such as, for |
| | | | co-cultured | Rev 165: 287-300 (1998), the contents of each of | example, melanoma (e.g., metastatic melanoma), |
| | | | cells express a | which are herein incorporated by reference in its | renal cell carcinoma (e.g., metastatic renal cell |
| | | | costimulatory | entirety. Highly preferred assays include those | carcinoma), leukemia, lymphoma (e.g., T cell |
| | | | transmembrane | wherein IL-2 production is tested for modulation | lymphoma), and prostate, breast, lung, colon, |
| | | | molecule. | by secreted proteins (in cell supernatents) or by | pancreatic, esophageal, stomach, brain, liver, ovarian, |
| | | | | cell-cell contact with membrane bound proteins | and urinary cancer. Other preferred indications |
| | | | | on cells in co-culture with T-cells, particularly | include benign dysproliferative disorders and pre- |
| | | | | wherein the co-cultured cells express a | neoplastic conditions, such as, for example, |
| | | | | transmembrane costimulatory molecule. Human | hyperplasia, metaplasia, and/or dysplasia. |
| | | | | T cells that may be used according to these assays | A highly preferred indication is infection (e.g., an |
| | | | | may be isolated using techniques disclosed herein | infectious disease as described below under |
| | | | | or otherwise known in the art. Human T cells are | “Infectious Disease”). A highly preferred indication is |
| | | | | primary human lymphocytes that mature in the | AIDS and HIV infection. |
| | | | | thymus and express a T cell receptor and CD3, | Additional highly preferred indications include |
| | | | | CD4, or CD8. These cells mediate humoral or | suppression of immune reactions to transplanted |
| | | | | cell-mediated immunity and may be preactivated | organs and/or tissues, uveitis, psoriasis, and tropical |
| | | | | to enhance responsiveness to immunomodulatory | spastic paraparesis. |
| | | | | factors. | Preferred indications include blood disorders |
| | | | | | (e.g., as described below under “Immune Activity”, |
| | | | | | “Blood-Related Disorders”, and/or “Cardiovascular |
| | | | | | Disorders”). Preferred indications include |
| | | | | | autoimmune diseases (e.g., rheumatoid arthritis, |
| | | | | | systemic lupus erythematosis, multiple sclerosis |
| | | | | | and/or as described below), immunodeficiencies (e.g., |
| | | | | | as described below), organ and tissue transplant |
| | | | | | rejection. |
| | | | | | Additional preferred indications include |
| | | | | | inflammation and inflammatory disorders. |
| | | | | | Preferred indications include anemia, pancytopenia, |
| | | | | | leukopenia, thrombocytopenia, Hodgkin's disease, |
| | | | | | acute lymphocytic anemia (ALL), plasmacytomas, |
| | | | | | multiple myeloma, Burkitt's lymphoma, Non- |
| | | | | | Hodgkin's lymphoma, Kaposi's sarcoma arthritis, |
| | | | | | granulomatous disease, inflammatory bowel disease, |
| | | | | | Hepatitis (e.g. Hepatitis C), sepsis, neutropenia, |
| | | | | | neutrophilia, psoriasis, hemophilia, hypercoagulation, |
| | | | | | diabetes mellitus, endocarditis, meningitis, Lyme |
| | | | | | Disease, asthma and allergy. |
| 74 | HECHX69 | 266 | Production of | Vascular endothelial growth factor (VEGF) is | Highly preferred indications include neoplastic |
| | | | Vascular | strong promoter of angiogenesis, the growth of | diseases wherein angiogenesis promotes disease |
| | | | Endothelial | new blood vessels from pre-existing vessels, | progression (e.g., solid tumor cancers including but |
| | | | Growth | which can contribute to the development of | not limited to melanoma, prostate, breast, lung, |
| | | | Factor | numerous types of tumors, and the formation of | pancreatic, esophageal, stomach, brain, liver and |
| | | | (VEGF), | metastases. In order to grow, tumors need new | urinary tract cancers, and/or as described below under |
| | | | particularly | blood vessels to form so that they can feed | “Hyperproliferative Disorders”). Other preferred |
| | | | in colon | themselves. Control of tumor angiogenesis is a | indications include benign dysproliferative disorders |
| | | | carcinoma | prime therapeutic target for cancer therapy. | and pre-neoplastic conditions, such as, for example, |
| | | | cell lines. | Assays to detect polypeptides of the invention | hyperplasia, metaplasia, and/or dysplasia. |
| | | | | (including antibodies and agonists or antagonists | |
| | | | | of the invention) that induce (or repress) VEGF | |
| | | | | production are well-known in the art and may be | |
| | | | | used or routinely modified to assess the ability of | |
| | | | | polypeptides of the invention (including | |
| | | | | antibodies and agonists or antagonists of the | |
| | | | | invention) to modulate VEGF production in vitro | |
| | | | | (e.g., colon carcinoma cell lines). | |
| 75 | HEGLP63 | 267 | Modulation | Assay to detect polypeptides of the invention | Highly preferred indications include neoplastic |
| | | | of | (including antibodies and agonists or antagonists | diseases (e.g., fibrosarcomas, leukemia, lymphoma, |
| | | | senescence, | of the invention) that induce (or repress) | and/or as described below under “Hyperproliferative |
| | | | particularly | senescence are well-known in the art and may be | Disorders”). Highly preferred indications include |
| | | | in fibroblast | used or routinely modified to assess the ability of | neoplasms and cancers, such as, for example, |
| | | | cells. | polypeptides of the invention (including | leukemia, lymphoma (e.g., T cell lymphoma, |
| | | | | antibodies and agonists or antagonists of the | Burkitt's lymphoma, non-Hodgkins lymphoma, |
| | | | | invention) to modulate senescence in vitro (e.g., in | Hodgkin's disease), melanoma, and prostate, breast, |
| | | | | fibroblast cell lines prone to early senescence). | lung, colon, pancreatic, stomach, brain, liver and |
| | | | | Factors that can affect cell senescence may have | urinary cancer. Other preferred indications include |
| | | | | utility in cancer, tissue regeneration and repair, | benign dysproliferative disorders and pre-neoplastic |
| | | | | and aging | conditions, such as, for example, hyperplasia, |
| | | | | | metaplasia, and/or dysplasia. |
| | | | | | Highly preferred indications also include wound |
| | | | | | healing and other disorders, pathologies, or treatments |
| | | | | | requiring tissue regeneration. |
| 75 | HEGLP63 | 267 | Modulation | Caspase Apoptosis. Assays for caspase apoptosis | A highly preferred embodiment of the invention |
| | | | of caspase | are well known in the art and may be used or | includes a method for stimulating apoptosis in |
| | | | activity; | routinely modified to assess the ability of | transformed, cancerous, or tumorigenic cells. An |
| | | | particularly | polypeptides of the invention (including | alternative highly preferred embodiment of the |
| | | | in | antibodies and agonists or antagonists of the | invention includes a method for inhibiting (e.g., |
| | | | transformed | invention) to promote or prevent caspase protease- | decreasing) apoptosis of normal cells (e.g., such to |
| | | | cells, such as | mediated apoptosis. Assays monitoring induction | increase the half-life of cells such as immune cells |
| | | | colon cancer | of apoptosis in transformed cells (such as a colon | (e.g., B-cells) in conditions wherein there is an |
| | | | cell lines, | cancer cell lines) is particularly valuable for | immune cell population deficiency). |
| | | | more | identifying polypeptides useful for treating | Highly preferred indications include neoplastic |
| | | | particularly | neoplasia. These assays may preferentially be | diseases (e.g., as described below under |
| | | | wherein | performed in the presence of a chemotherapeutic | “Hyperproliferative Disorders”), and disorders of the |
| | | | modulation | agent (e.g., paclitaxel) to enhance assay | immune and hematopoietic system (e.g., such as |
| | | | of caspase | sensitivity. Exemplary assays for caspase | described below under “Immune Activity”, and |
| | | | activity is | apoptosis that may be used or routinely modified | “Blood-Related Disorders). Preferred indications |
| | | | performed in | to test caspase apoptosis activity of polypeptides | include autoimmune diseases (e.g., rheumatoid |
| | | | the presence | of the invention (including antibodies and agonists | arthritis, systemic lupus erythematosis, multiple |
| | | | of a | or antagonists of the invention) include the assays | sclerosis and/or as described below) and |
| | | | chemotherapeutic | disclosed in Lee et al., FEBS Left 485(2-3): 122-126 | immunodeficiencies (e.g., as described below). |
| | | | agent | (2000); Nor et al., J Vasc Res 37(3): 209-218 | Additional preferred indications include inflammation |
| | | | (e.g., | (2000); and Karsan and Harlan, J Atheroscler | and inflammatory disorders (such as acute and chronic |
| | | | paclitaxel). | Thromb 3(2): 75-80 (1996); the contents of each | inflammatory diseases, e.g., inflammatory bowel |
| | | | | of which are herein incorporated by reference in | disease and Crohn's disease). |
| | | | | its entirety. Endothelial cells that may be used | |
| | | | | according to these assays are publicly available | |
| | | | | (e.g., through commercial sources). | |
| 75 | HEGLP63 | 267 | Modulation | CXCR4 is a G-protein-coupled, 7-transmembrane | Highly preferred indications include neoplastic |
| | | | of CXCR4 | domain receptor thought to play a critical role in | diseases (e.g., as described below under |
| | | | expression; | motility, homing and proliferation of cancer cells | “Hyperproliferative Disorders”), blood disorders (e.g., |
| | | | particularly | at specific metastatic sites. CXCR4 is also is a | as described below under “Immune Activity” and/or |
| | | | in | major co-receptor for T-cell-tropic HIV-1 strains, | “Blood-Related Disorders”), immune disorders (e.g., |
| | | | transformed | and thus an important mediator of cell | as described below under “Immune Activity”) and |
| | | | cells, e.g., | entry/infection by HIV. Exemplary assays that | infections (e.g., as described below under “Infectious |
| | | | such as colon | may be used or routinely modified to monitor | Disease”), particularly HIV infection. |
| | | | cancer cell | modulation of CXCR4 expression by polypeptides | Highly preferred indications also include |
| | | | lines. | of the invention (including antibodies and agonists | autoimmune diseases (e.g., rheumatoid arthritis, |
| | | | | or antagonists of the invention) are well known by | systemic lupus erythematosis, multiple sclerosis |
| | | | | those of ordinary skill in the art. In particular, | and/or as described below) and immunodeficiencies |
| | | | | assays that measure modulation of CXCR4 | (e.g., as described below). Additional highly |
| | | | | expression in transformed cells, such as colon | preferred indications include inflammation and |
| | | | | cancer cells, are useful for identification of | inflammatory disorders. Highly preferred |
| | | | | polypeptides (including antibodies and agonists or | indications also include cancers such as, kidney, |
| | | | | antagonists of the invention) which may be used | melanoma, prostate, breast, lung, colon, pancreatic, |
| | | | | in treatment of cancer and other neoplasias. | esophageal, stomach, brain, liver, urinary cancer, |
| | | | | Similarly, assays that measure modulation of | lymphoma and leukemias. Other preferred indications |
| | | | | CXCR4 expression in immune cells, such as T- | include benign dysproliferative disorders and pre- |
| | | | | cells, are useful for identification of polypeptides | neoplastic conditions, such as, for example, |
| | | | | (including antibodies and agonists or antagonists | hyperplasia, metaplasia, and/or dysplasia. Other |
| | | | | of the invention) which may be used in treatment | highly preferred indications include, pancytopenia, |
| | | | | of HIV/AIDS. | leukopenia, leukemias, Hodgkin's disease, acute |
| | | | | | lymphocytic anemia (ALL), arthritis, asthma, |
| | | | | | HIV/AIDS, granulomatous disease, inflammatory |
| | | | | | bowel disease, sepsis, psoriasis, immune reactions to |
| | | | | | transplanted organs and tissues, endocarditis, |
| | | | | | meningitis, Lyme Disease, and allergies. |
| 77 | HEFID84 | 269 | Modulation | Caspase Apoptosis. Assays for caspase apoptosis | A highly preferred embodiment of the invention |
| | | | of caspase | are well known in the art and may be used or | includes a method for stimulating apoptosis in |
| | | | activity; | routinely modified to assess the ability of | transformed, cancerous, or tumorigenic cells. An |
| | | | particularly | polypeptides of the invention (including | alternative highly preferred embodiment of the |
| | | | in | antibodies and agonists or antagonists of the | invention includes a method for inhibiting (e.g., |
| | | | transformed | invention) to promote or prevent caspase protease- | decreasing) apoptosis of normal cells (e.g., such to |
| | | | cells, such as | mediated apoptosis. Assays monitoring induction | increase the half-life of cells such as immune cells |
| | | | colon cancer | of apoptosis in transformed cells (such as a colon | (e.g., B-cells) in conditions wherein there is an |
| | | | cell lines, | cancer cell lines) is particularly valuable for | immune cell population deficiency). |
| | | | more | identifying polypeptides useful for treating | Highly preferred indications include neoplastic |
| | | | particularly | neoplasia. These assays may preferentially be | diseases (e.g., as described below under |
| | | | wherein | performed in the presence of a chemotherapeutic | “Hyperproliferative Disorders”), and disorders of the |
| | | | modulation | agent (e.g., paclitaxel) to enhance assay | immune and hematopoietic system (e.g., such as |
| | | | of caspase | sensitivity. Exemplary assays for caspase | described below under “Immune Activity”, and |
| | | | activity is | apoptosis that may be used or routinely modified | “Blood-Related Disorders). Preferred indications |
| | | | performed in | to test caspase apoptosis activity of polypeptides | include autoimmune diseases (e.g., rheumatoid |
| | | | the presence | of the invention (including antibodies and agonists | arthritis, systemic lupus erythematosis, multiple |
| | | | of a | or antagonists of the invention) include the assays | sclerosis and/or as described below) and |
| | | | chemotherapeutic | disclosed in Lee et al., FEBS Lett 485(2-3): 122-126 | immunodeficiencies (e.g., as described below). |
| | | | agent | (2000); Nor et al., J Vasc Res 37(3): 209-218 | Additional preferred indications include inflammation |
| | | | (e.g., | (2000); and Karsan and Harlan, J Atheroscler | and inflammatory disorders (such as acute and chronic |
| | | | paclitaxel). | Thromb 3(2): 75-80 (1996); the contents of each | inflammatory diseases, e.g., inflammatory bowel |
| | | | | of which are herein incorporated by reference in | disease and Crohn's disease). |
| | | | | its entirety. Endothelial cells that may be used | |
| | | | | according to these assays are publicly available | |
| | | | | (e.g., through commercial sources). | |
| 78 | HEHXR32 | 270 | Modulation | CXCR4 is a G-protein-coupled, 7-transmembrane | Highly preferred indications include neoplastic |
| | | | of CXCR4 | domain receptor thought to play a critical role in | diseases (e.g., as described below under |
| | | | expression; | motility, homing and proliferation of cancer cells | “Hyperproliferative Disorders”), blood disorders (e.g., |
| | | | particularly | at specific metastatic sites. CXCR4 is also is a | as described below under “Immune Activity” and/or |
| | | | in | major co-receptor for T-cell-tropic HIV-1 strains, | “Blood-Related Disorders”), immune disorders (e.g., |
| | | | transformed | and thus an important mediator of cell | as described below under “Immune Activity”) and |
| | | | cells, e.g., | entry/infection by HIV. Exemplary assays that | infections (e.g., as described below under “Infectious |
| | | | such as | may be used or routinely modified to monitor | Disease”), particularly HIV infection. |
| | | | fibrosarcoma | modulation of CXCR4 expression by polypeptides | Highly preferred indications also include |
| | | | cell lines. | of the invention (including antibodies and agonists | autoimmune diseases (e.g., rheumatoid arthritis, |
| | | | | or antagonists of the invention) are well known by | systemic lupus erythematosis, multiple sclerosis |
| | | | | those of ordinary skill in the art. In particular, | and/or as described below) and immunodeficiencies |
| | | | | assays that measure modulation of CXCR4 | (e.g., as described below). Additional highly |
| | | | | expression in transformed cells, such as | preferred indications include inflammation and |
| | | | | fibrosarcoma cells, are useful for identification of | inflammatory disorders. Highly preferred |
| | | | | polypeptides (including antibodies and agonists or | indications also include cancers such as, kidney, |
| | | | | antagonists of the invention) which may be used | melanoma, prostate, breast, lung, colon, pancreatic, |
| | | | | in treatment of cancer and other neoplasias. | esophageal, stomach, brain, liver, urinary cancer, |
| | | | | Similarly, assays that measure modulation of | lymphoma and leukemias. Other preferred indications |
| | | | | CXCR4 expression in immune cells, such as T- | include benign dysproliferative disorders and pre- |
| | | | | cells, are useful for identification of polypeptides | neoplastic conditions, such as, for example, |
| | | | | (including antibodies and agonists or antagonists | hyperplasia, metaplasia, and/or dysplasia. Other |
| | | | | of the invention) which may be used in treatment | highly preferred indications include, pancytopenia, |
| | | | | of HIV/AIDS. | leukopenia, leukemias, Hodgkin's disease, acute |
| | | | | | lymphocytic anemia (ALL), arthritis, asthma, |
| | | | | | HIV/AIDS, granulomatous disease, inflammatory |
| | | | | | bowel disease, sepsis, psoriasis, immune reactions to |
| | | | | | transplanted organs and tissues, endocarditis, |
| | | | | | meningitis, Lyme Disease, and allergies. |
| 79 | HMFHW53 | 271 | Production of | Vascular endothelial growth factor (VEGF) is | Highly preferred indications include neoplastic diseases |
| | | | Vascular | strong promoter of angiogenesis, the growth of | wherein angiogenesis promotes disease progression (e.g., |
| | | | Endothelial | new blood vessels from pre-existing vessels, | solid tumor cancers including but not limited to |
| | | | Growth | which can contribute to the development of | melanoma, prostate, breast, lung, pancreatic, esophageal, |
| | | | Factor | numerous types of tumors, and the formation of | stomach, brain, liver and urinary tract cancers, and/or as |
| | | | (VEGF), | metastases. In order to grow, tumors need new | described below under “Hyperproliferative Disorders”). |
| | | | particularly | blood vessels to form so that they can feed | Other preferred indications include benign |
| | | | in | themselves. Control of tumor angiogenesis is a | dysproliferative disorders and pre-neoplastic conditions, |
| | | | fibrosarcoma | prime therapeutic target for cancer therapy. | such as, for example, hyperplasia, metaplasia, and/or |
| | | | cell lines. | Assays to detect polypeptides of the invention | dysplasia. |
| | | | | (including antibodies and agonists or antagonists | |
| | | | | of the invention) that induce (or repress) VEGF | |
| | | | | production are well-known in the art and may be | |
| | | | | used or routinely modified to assess the ability of | |
| | | | | polypeptides of the invention (including | |
| | | | | antibodies and agonists or antagonists of the | |
| | | | | invention) to modulate VEGF production in vitro | |
| | | | | (e.g., human fibrosarcoma cell lines). | |
| 79 | HMFHW53 | 271 | Modulation | Caspase Apoptosis. Assays for caspase apoptosis | A highly preferred embodiment of the invention |
| | | | of caspase | are well known in the art and may be used or | includes a method for stimulating apoptosis in |
| | | | activity; | routinely modified to assess the ability of | transformed, cancerous, or tumorigenic cells. An |
| | | | particularly | polypeptides of the invention (including | alternative highly preferred embodiment of the |
| | | | in | antibodies and agonists or antagonists of the | invention includes a method for inhibiting (e.g., |
| | | | transformed | invention) to promote or prevent caspase protease- | decreasing) apoptosis of normal cells (e.g., such to |
| | | | cells, such as | mediated apoptosis. Assays monitoring induction | increase the half-life of cells such as immune cells |
| | | | colon cancer | of apoptosis in transformed cells (such as a colon | (e.g., B-cells) in conditions wherein there is an |
| | | | cell lines, | cancer cell lines) is particularly valuable for | immune cell population deficiency). |
| | | | more | identifying polypeptides useful for treating | Highly preferred indications include neoplastic |
| | | | particularly | neoplasia. These assays may preferentially be | diseases (e.g., as described below under |
| | | | wherein | performed in the presence of a chemotherapeutic | “Hyperproliferative Disorders”), and disorders of the |
| | | | modulation | agent (e.g., paclitaxel) to enhance assay | immune and hematopoietic system (e.g., such as |
| | | | of caspase | sensitivity. Exemplary assays for caspase | described below under “Immune Activity”, and |
| | | | activity is | apoptosis that may be used or routinely modified | “Blood-Related Disorders). Preferred indications |
| | | | performed in | to test caspase apoptosis activity of polypeptides | include autoimmune diseases (e.g., rheumatoid |
| | | | the presence | of the invention (including antibodies and agonists | arthritis, systemic lupus erythematosis, multiple |
| | | | of a | or antagonists of the invention) include the assays | sclerosis and/or as described below) and |
| | | | chemotherapeutic | disclosed in Lee et al., FEBS Lett 485(2-3): 122-126 | immunodeficiencies (e.g., as described below). |
| | | | agent | (2000); Nor et al., J Vasc Res 37(3): 209-218 | Additional preferred indications include inflammation |
| | | | (e.g., | (2000); and Karsan and Harlan, J Atheroscler | and inflammatory disorders (such as acute and chronic |
| | | | paclitaxel). | Thromb 3(2): 75-80 (1996); the contents of each | inflammatory diseases, e.g., inflammatory bowel |
| | | | | of which are herein incorporated by reference in | disease and Crohn's disease). |
| | | | | its entirety. Endothelial cells that may be used | |
| | | | | according to these assays are publicly available | |
| | | | | (e.g., through commercial sources). | |
| 80 | HEDCZ72 | 272 | Modulation | Squalene synthtase is a key enzyme in the | A highly preferred embodiment of the invention |
| | | | of squalene - | production of liver cholesterol which is a major | includes a method for inhibiting (e.g., reducing) |
| | | | synthetase | risk factor in atherosclerosis and coronary heart | squalene synthtase production. An alternative highly |
| | | | promoter in | disease. | preferred embodiment of the invention includes a |
| | | | liver cells | Assays for the activation of the squalene - | method for stimulating (e.g., increasing) squalene |
| | | | (particularly | synthetase promoter are well-known in the art and | synthtase production. |
| | | | in liver cell | may be used or routinely modified to assess the | A highly preferred indication includes a method |
| | | | lines). | ability of polypeptides of the invention (including | for reducing cholesterol levels in blood plasma. |
| | | | | antibodies and agonists or antagonists of the | A highly preferred indication includes heart |
| | | | | invention) to regulate production of squalene | disease and cardiovascular disorders (e.g., as |
| | | | | synthetase by liver cells (natural isolates) and | described below under “Cardiovascular Disorders”). |
| | | | | liver cell lines. | A highly preferred indication includes |
| | | | | | atherosclerosis. |
| 81 | HECKQ42 | 273 | Modulation | The cAMP signaling pathway is critical for | Highly preferred indications include neoplastic |
| | | | of cyclic- | osteoblast differentiation and functions in bone | diseases (e.g., osteosarcoma and other bone cancers, |
| | | | AMP | development. | leukemia, lymphoma, and/or as described below |
| | | | (cAMP) | Assays to detect polypeptides of the invention | under “Hyperproliferative Disorders”). Highly |
| | | | production; | (including antibodies and agonists or antagonists | preferred indications include neoplasms and cancers, |
| | | | particularly | of the invention) that induce (or repress) cell | such as, for example, leukemia, lymphoma (e.g., T |
| | | | in osteoblast | viability are well-known in the art and may be | cell lymphoma, Burkitt's lymphoma, non-Hodgkins |
| | | | cells and | used or routinely modified to assess the ability of | lymphoma, Hodgkin's disease), melanoma, and |
| | | | transformed | polypeptides of the invention (including | prostate, breast, lung, pancreatic, esophageal, |
| | | | osteoblast- | antibodies and agonists or antagonists of the | stomach, brain, liver and urinary cancer. Other |
| | | | like cell lines | invention) to modulate cell viability of | preferred indications include benign dysproliferative |
| | | | (e.g., rat | transformed cell lines in vitro (e.g., rat | disorders and pre-neoplastic conditions, such as, for |
| | | | osteosarcoma | osteosarcoma cell lines). | example, hyperplasia, metaplasia, and/or dysplasia. |
| | | | cell lines). | | |
| 82 | HEHXJ43 | 274 | Modulation | CXCR4 is a G-protein-coupled, 7-transmembrane | Highly preferred indications include neoplastic |
| | | | of CXCR4 | domain receptor thought to play a critical role in | diseases (e.g., as described below under |
| | | | expression; | motility, homing and proliferation of cancer cells | “Hyperproliferative Disorders”), blood disorders (e.g., |
| | | | particularly | at specific metastatic sites. CXCR4 is also is a | as described below under “Immune Activity” and/or |
| | | | in | major co-receptor for T-cell-tropic HIV-1 strains, | “Blood-Related Disorders”), immune disorders (e.g., |
| | | | transformed | and thus an important mediator of cell | as described below under “Immune Activity”) and |
| | | | cells, e.g., | entry/infection by HIV. Exemplary assays that | infections (e.g., as described below under “Infectious |
| | | | such as | may be used or routinely modified to monitor | Disease”), particularly HIV infection. |
| | | | fibrosarcoma | modulation of CXCR4 expression by polypeptides | Highly preferred indications also include |
| | | | cell lines. | of the invention (including antibodies and agonists | autoimmune diseases (e.g., rheumatoid arthritis, |
| | | | | or antagonists of the invention) are well known by | systemic lupus erythematosis, multiple sclerosis |
| | | | | those of ordinary skill in the art. In particular, | and/or as described below) and immunodeficiencies |
| | | | | assays that measure modulation of CXCR4 | (e.g., as described below). Additional highly |
| | | | | expression in transformed cells, such as | preferred indications include inflammation and |
| | | | | fibrosarcoma cells, are useful for identification of | inflammatory disorders. Highly preferred |
| | | | | polypeptides (including antibodies and agonists or | indications also include cancers such as, kidney, |
| | | | | antagonists of the invention) which may be used | melanoma, prostate, breast, lung, colon, pancreatic, |
| | | | | in treatment of cancer and other neoplasias. | esophageal, stomach, brain, liver, urinary cancer, |
| | | | | Similarly, assays that measure modulation of | lymphoma and leukemias. Other preferred indications |
| | | | | CXCR4 expression in immune cells, such as T- | include benign dysproliferative disorders and pre- |
| | | | | cells, are useful for identification of polypeptides | neoplastic conditions, such as, for example, |
| | | | | (including antibodies and agonists or antagonists | hyperplasia, metaplasia, and/or dysplasia. Other |
| | | | | of the invention) which may be used in treatment | highly preferred indications include, pancytopenia, |
| | | | | of HIV/AIDS. | leukopenia, leukemias, Hodgkin's disease, acute |
| | | | | | lymphocytic anemia (ALL), arthritis, asthma, |
| | | | | | HIV/AIDS, granulomatous disease, inflammatory |
| | | | | | bowel disease, sepsis, psoriasis, immune reactions to |
| | | | | | transplanted organs and tissues, endocarditis, |
| | | | | | meningitis, Lyme Disease, and allergies. |
| 82 | HEHXJ43 | 274 | Production of | Immunoglobulin G (IgG) is the predominant | A highly preferred embodiment of the invention |
| | | | Immunoglobulin | antibody molecule circulating in normal human | includes a method for stimulating antibody (in |
| | | | G (IgG) | blood plasma. IgG is a critical component of host | particular, IgG) production. An alternative highly |
| | | | in immune | environment defenses to pathogenic challenge | preferred embodiment of the invention includes a |
| | | | cells, | (particularly following primary challenge by viral | method for inhibiting (e.g., reducing) antibody (in |
| | | | particularly | or bacterial pathogens). IgG molecules are | particular, IgG) production. |
| | | | B-cells. | produced by B-cells. B-cell maturation occurs as | Highly preferred indications include infection (e.g., |
| | | | | these cells evolve to produce IgG molecules with | an infectious disease as described below under |
| | | | | high specificity for particular pathogens (e.g., | “Infectious Disease”), immune disorders (e.g., as |
| | | | | antibodies to a particular virus). Exemplary | described below under “Immune Activity” and |
| | | | | assays that may be used or routinely modified to | “Blood-Related Disorders”). Preferred indications |
| | | | | monitor modulation of B-cell IgG production by | include autoimmune diseases (e.g., rheumatoid |
| | | | | polypeptides of the invention (including | arthritis, systemic lupus erythematosis, multiple |
| | | | | antibodies and agonists or antagonists of the | sclerosis and/or as described below), |
| | | | | invention) are well known by those of ordinary | immunodeficiencies (e.g., as described below), |
| | | | | skill in the art. Such assays are particularly useful | boosting a B-cell mediated immune response, or |
| | | | | in identifying polypeptides of the invention | suppressing a B-cell-mediated immune response. |
| | | | | (including antibodies and agonists or antagonists | Additional preferred indications include inflammation |
| | | | | of the invention) that may be used to treat | and inflammatory disorders. Highly preferred |
| | | | | infectious diseases and immune disorders. | indications also include neoplastic diseases (e.g., |
| | | | | | leukemia, lymphoma, and/or as described below |
| | | | | | under “Hyperproliferative Disorders”). Highly |
| | | | | | preferred indications include neoplasms and cancers, |
| | | | | | such as, for example, leukemia, lymphoma (e.g., T |
| | | | | | cell lymphoma, Burkitt's lymphoma, non-Hodgkins |
| | | | | | lymphoma, Hodgkin's disease), melanoma, and |
| | | | | | prostate, breast, lung, colon, pancreatic, esophageal, |
| | | | | | stomach, brain, liver and urinary cancer. Other |
| | | | | | preferred indications include benign dysproliferative |
| | | | | | disorders and pre-neoplastic conditions, such as, for |
| | | | | | example, hyperplasia, metaplasia, and/or dysplasia. |
| | | | | | Preferred indications include anemia, pancytopenia, |
| | | | | | leukopenia, thrombocytopenia, acute lymphocytic |
| | | | | | anemia (ALL), plasmacytomas, multiple myeloma, |
| | | | | | arthritis, AIDS, granulomatous disease, inflammatory |
| | | | | | bowel disease, sepsis, neutropenia, neutrophilia, |
| | | | | | psoriasis, suppression of immune reactions to |
| | | | | | transplanted organs and tissues, hemophilia, |
| | | | | | hypercoagulation, diabetes mellitus, endocarditis, |
| | | | | | meningitis, Lyme Disease, and asthma and allergy. |
| 84 | HEDEQ16 | 276 | Production of | IL-6 FMAT. IL-6 has strong effects on immune | A highly preferred embodiment of the invention |
| | | | IL-6 by | cells. For example, IL-6 participates in IL-4 | includes a method for stimulating IL-6 production. An |
| | | | endothelial | induced IgE production and increases IgA | alternative highly preferred embodiment of the |
| | | | cells (such as | production (IgA plays a role in mucosal | invention includes a method for inhibiting (e.g., |
| | | | Human | immunity). IL-6 induces cytotoxic T cells. | reducing) IL-6 production. |
| | | | Umbilical | Deregulated expression of IL-6 has been linked to | Highly preferred indications include |
| | | | Cord | autoimmune disease, plasmacytomas, myelomas, | immunological and inflammatory disorders (e.g., such |
| | | | Endothelial | and chronic hyperproliferative diseases. Assays | as allergy and asthma) and as described below under |
| | | | Cells). | for immunomodulatory and differentiation factor | “Immune Activity”, and “Blood-Related Disorders”. |
| | | | | proteins produced by a large variety of cells where | Highly preferred indications also include autoimmune |
| | | | | the expression level is strongly regulated by | disorders (e.g., rheumatoid arthritis, systemic lupus |
| | | | | cytokines, growth factors, and hormones are well | erythematosis, Crohn's disease, multiple sclerosis |
| | | | | known in the art and may be used or routinely | and/or as described below), neoplastic disorders (e.g., |
| | | | | modified to assess the ability of polypeptides of | organ cancers such as lung, liver, colon cancer, and/or |
| | | | | the invention (including antibodies and agonists or | as described below under “Hyperproliferative |
| | | | | antagonists of the invention) to mediate | Disorders”), and cardiovascular disorders (e.g. such as |
| | | | | immunomodulation and differentiation and | described below under “Cardiovascular Disorders”). |
| | | | | modulate T cell proliferation and function. | |
| | | | | Exemplary assays that test for immunomodulatory | |
| | | | | proteins evaluate the production of cytokines, | |
| | | | | such as IL-6, and the stimulation and upregulation | |
| | | | | of T cell proliferation and functional activities. | |
| | | | | Such assays that may be used or routinely | |
| | | | | modified to test immunomodulatory and | |
| | | | | differentiation activity of polypeptides of the | |
| | | | | invention (including antibodies and agonists or | |
| | | | | antagonists of the invention) include assays | |
| | | | | disclosed in Miraglia et al., J Biomolecular | |
| | | | | Screening 4: 193-204(1999); Rowland et al., | |
| | | | | “Lymphocytes: a practical approach” Chapter | |
| | | | | 6: 138-160 (2000); and Verhasselt et al., J | |
| | | | | Immunol 158: 2919-2925 (1997), the contents of | |
| | | | | each of which are herein incorporated by | |
| | | | | reference in its entirety. HUVECs are endothelial | |
| | | | | cells which line venous blood vessels, and are | |
| | | | | involved in functions that include, but are not | |
| | | | | limited to, angiogenesis, vascular permeability, | |
| | | | | vascular tone, and immune cell extravasation. | |
| | | | | Endothelial cells play a pivotal role in the | |
| | | | | initiation and perpetuation of inflammation and | |
| | | | | secretion of IL-6 may play an important role in | |
| | | | | recruitment and activation of immune cells such | |
| | | | | as neutrophils, macrophages, and lymphocytes. | |
| 86 | HMFHN24 | 278 | Modulation | Caspase Apoptosis. Assays for caspase apoptosis | A highly preferred embodiment of the invention |
| | | | of caspase | are well known in the art and may be used or | includes a method for stimulating apoptosis in |
| | | | activity; | routinely modified to assess the ability of | transformed, cancerous, or tumorigenic cells. An |
| | | | particularly | polypeptides of the invention (including | alternative highly preferred embodiment of the |
| | | | in | antibodies and agonists or antagonists of the | invention includes a method for inhibiting (e.g., |
| | | | transformed | invention) to promote or prevent caspase protease- | decreasing) apoptosis of normal cells (e.g., such to |
| | | | cells, such as | mediated apoptosis. Assays monitoring induction | increase the half-life of cells such as immune cells |
| | | | colon cancer | of apoptosis in transformed cells (such as a colon | (e.g., B-cells) in conditions wherein there is an |
| | | | cell lines, | cancer cell lines) is particularly valuable for | immune cell population deficiency). |
| | | | more | identifying polypeptides useful for treating | Highly preferred indications include neoplastic |
| | | | particularly | neoplasia. These assays may preferentially be | diseases (e.g., as described below under |
| | | | wherein | performed in the presence of a chemotherapeutic | “Hyperproliferative Disorders”), and disorders of the |
| | | | modulation | agent (e.g., paclitaxel) to enhance assay | immune and hematopoietic system (e.g., such as |
| | | | of caspase | sensitivity. Exemplary assays for caspase | described below under “Immune Activity”, and |
| | | | activity is | apoptosis that may be used or routinely modified | “Blood-Related Disorders). Preferred indications |
| | | | performed in | to test caspase apoptosis activity of polypeptides | include autoimmune diseases (e.g., rheumatoid |
| | | | the presence | of the invention (including antibodies and agonists | arthritis, systemic lupus erythematosis, multiple |
| | | | of a | or antagonists of the invention) include the assays | sclerosis and/or as described below) and |
| | | | chemotherapeutic | disclosed in Lee et al., FEBS Lett 485(2-3): 122-126 | immunodeficiencies (e.g., as described below). |
| | | | agent | (2000); Nor et al., J Vasc Res 37(3): 209-218 | Additional preferred indications include inflammation |
| | | | (e.g., | (2000); and Karsan and Harlan, J Atheroscler | and inflammatory disorders (such as acute and chronic |
| | | | paclitaxel). | Thromb 3(2): 75-80 (1996); the contents of each | inflammatory diseases, e.g., inflammatory bowel |
| | | | | of which are herein incorporated by reference in | disease and Crohn's disease). |
| | | | | its entirety. Endothelial cells that may be used | |
| | | | | according to these assays are publicly available | |
| | | | | (e.g., through commercial sources). | |
| 87 | HMFHX66 | 279 | Modulation | Squalene synthtase is a key enzyme in the | A highly preferred embodiment of the invention |
| | | | of squalene - | production of liver cholesterol which is a major | includes a method for inhibiting (e.g., reducing) |
| | | | synthetase | risk factor in atherosclerosis and coronary heart | squalene synthtase production. An alternative highly |
| | | | promoter in | disease. | preferred embodiment of the invention includes a |
| | | | liver cells | Assays for the activation of the squalene - | method for stimulating (e.g., increasing) squalene |
| | | | (particularly | synthetase promoter are well-known in the art and | synthtase production. |
| | | | in liver cell | may be used or routinely modified to assess the | A highly preferred indication includes a method |
| | | | lines). | ability of polypeptides of the invention (including | for reducing cholesterol levels in blood plasma. |
| | | | | antibodies and agonists or antagonists of the | A highly preferred indication includes heart |
| | | | | invention) to regulate production of squalene | disease and cardiovascular disorders (e.g., as |
| | | | | synthetase by liver cells (natural isolates) and | described below under “Cardiovascular Disorders”). |
| | | | | liver cell lines. | A highly preferred indication includes |
| | | | | | atherosclerosis. |
| 87 | HMFHX66 | 279 | Modulation | CXCR4 is a G-protein-coupled, 7-transmembrane | Highly preferred indications include neoplastic |
| | | | of CXCR4 | domain receptor thought to play a critical role in | diseases (e.g., as described below under |
| | | | expression; | motility, homing and proliferation of cancer cells | “Hyperproliferative Disorders”), blood disorders (e.g., |
| | | | particularly | at specific metastatic sites. CXCR4 is also is a | as described below under “Immune Activity” and/or |
| | | | in | major co-receptor for T-cell-tropic HIV-1 strains, | “Blood-Related Disorders”), immune disorders (e.g., |
| | | | transformed | and thus an important mediator of cell | as described below under “Immune Activity”) and |
| | | | cells, e.g., | entry/infection by HIV. Exemplary assays that | infections (e.g., as described below under “Infectious |
| | | | such as | may be used or routinely modified to monitor | Disease”), particularly HIV infection. |
| | | | fibrosarcoma | modulation of CXCR4 expression by polypeptides | Highly preferred indications also include |
| | | | cell lines. | of the invention (including antibodies and agonists | autoimmune diseases (e.g., rheumatoid arthritis, |
| | | | | or antagonists of the invention) are well known by | systemic lupus erythematosis, multiple sclerosis |
| | | | | those of ordinary skill in the art. In particular, | and/or as described below) and immunodeficiencies |
| | | | | assays that measure modulation of CXCR4 | (e.g., as described below). Additional highly |
| | | | | expression in transformed cells, such as | preferred indications include inflammation and |
| | | | | fibrosarcoma cells, are useful for identification of | inflammatory disorders. Highly preferred |
| | | | | polypeptides (including antibodies and agonists or | indications also include cancers such as, kidney, |
| | | | | antagonists of the invention) which may be used | melanoma, prostate, breast, lung, colon, pancreatic, |
| | | | | in treatment of cancer and other neoplasias. | esophageal, stomach, brain, liver, urinary cancer, |
| | | | | Similarly, assays that measure modulation of | lymphoma and leukemias. Other preferred indications |
| | | | | CXCR4 expression in immune cells, such as T- | include benign dysproliferative disorders and pre- |
| | | | | cells, are useful for identification of polypeptides | neoplastic conditions, such as, for example, |
| | | | | (including antibodies and agonists or antagonists | hyperplasia, metaplasia, and/or dysplasia. Other |
| | | | | of the invention) which may be used in treatment | highly preferred indications include, pancytopenia, |
| | | | | of HIV/AIDS. | leukopenia, leukemias, Hodgkin's disease, acute |
| | | | | | lymphocytic anemia (ALL), arthritis, asthma, |
| | | | | | HIV/AIDS, granulomatous disease, inflammatory |
| | | | | | bowel disease, sepsis, psoriasis, immune reactions to |
| | | | | | transplanted organs and tissues, endocarditis, |
| | | | | | meningitis, Lyme Disease, and allergies. |
| 88 | HEENV67 | 280 | Production of | IL-2 FMAT. IL-2 is the principal T cell factor | A highly preferred embodiment of the invention |
| | | | IL-2 and | that allows T cell expansion and differentiation | includes a method for stimulating IL-2 production. An |
| | | | activation of | into effector cells. Assays for immunomodulatory | alternative highly preferred embodiment of the |
| | | | T cells; | proteins secreted by T cells that promote T cell | invention includes a method for inhibiting (e.g., |
| | | | particularly | and NK cell growth and differentiation are well | reducing) IL-2 production. |
| | | | wherein IL-2 | known in the art and may be used or routinely | A highly preferred embodiment of the invention |
| | | | secretion is | modified to assess the ability of polypeptides of | includes a method for stimulating T cell expansion. |
| | | | modulated by | the invention (including antibodies and agonists or | An alternative highly preferred embodiment of the |
| | | | contact with | antagonists of the invention) to mediate | invention includes a method for inhibiting T cell |
| | | | secreted | immunomodulation, promote immune cell growth | expansion. |
| | | | proteins in | and differentiation, and/or mediate humoral or | A highly preferred embodiment of the invention |
| | | | cell | cell-mediated immunity. Exemplary assays that | includes a method for stimulating T cell |
| | | | supernatents | test for immunomodulatory proteins evaluate the | differentiation. In a specific embodiment, this method |
| | | | and/or by | production of cytokines, such as IL-2, and the | stimulates T cell differentiation into effector cells. An |
| | | | contact with | activation of T cells. Such assays that may be | alternative highly preferred embodiment of the |
| | | | membrane | used or routinely modified to test | invention includes a method for inhibiting T cell |
| | | | bound | immunomodulatory activity of polypeptides of the | differentiation. In a specific embodiment, this method |
| | | | proteins | invention (including antibodies and agonists or | inhibits the differentiation of T cells into effector |
| | | | through in | antagonists of the invention) include the assays | cells. |
| | | | vitro cell-cell | disclosed in Miraglia et al., J Biomolecular | Highly preferred indications include neoplastic |
| | | | contact with | Screening 4: 193-204 (1999); Rowland et al., | diseases (e.g., melanoma, renal cell carcinoma, |
| | | | cells in co- | “Lymphocytes: a practical approach” Chapter | leukemia, lymphoma, and/or as described below |
| | | | culture, | 6: 138-160 (2000); Laduda et al., Immunology | under “Hyperproliferative Disorders”). Highly |
| | | | wherein the | 94(4): 496-502 (1998); and Powell et al., Immunol | preferred indications include neoplasms, such as, for |
| | | | co-cultured | Rev 165: 287-300 (1998), the contents of each of | example, melanoma (e.g., metastatic melanoma), |
| | | | cells express a | which are herein incorporated by reference in its | renal cell carcinoma (e.g., metastatic renal cell |
| | | | costimulatory | entirety. Highly preferred assays include those | carcinoma), leukemia, lymphoma (e.g., T cell |
| | | | transmembrane | wherein IL-2 production is tested for modulation | lymphoma), and prostate, breast, lung, colon, |
| | | | molecule. | by secreted proteins (in cell supernatents) or by | pancreatic, esophageal, stomach, brain, liver, ovarian, |
| | | | | cell-cell contact with membrane bound proteins | and urinary cancer. Other preferred indications |
| | | | | on cells in co-culture with T-cells, particularly | include benign dysproliferative disorders and pre- |
| | | | | wherein the co-cultured cells express a | neoplastic conditions, such as, for example, |
| | | | | transmembrane costimulatory molecule. Human | hyperplasia, metaplasia, and/or dysplasia. |
| | | | | T cells that may be used according to these assays | A highly preferred indication is infection (e.g., an |
| | | | | may be isolated using techniques disclosed herein | infectious disease as described below under |
| | | | | or otherwise known in the art. Human T cells are | “Infectious Disease”). A highly preferred indication is |
| | | | | primary human lymphocytes that mature in the | AIDS and HIV infection. |
| | | | | thymus and express a T cell receptor and CD3, | Additional highly preferred indications include |
| | | | | CD4, or CD8. These cells mediate humoral or | suppression of immune reactions to transplanted |
| | | | | cell-mediated immunity and may be preactivated | organs and/or tissues, uveitis, psoriasis, and tropical |
| | | | | to enhance responsiveness to immunomodulatory | spastic paraparesis. |
| | | | | factors. | Preferred indications include blood disorders |
| | | | | | (e.g., as described below under “Immune Activity”, |
| | | | | | “Blood-Related Disorders”, and/or “Cardiovascular |
| | | | | | Disorders”). Preferred indications include |
| | | | | | autoimmune diseases (e.g., rheumatoid arthritis, |
| | | | | | systemic lupus erythematosis, multiple sclerosis |
| | | | | | and/or as described below), immunodeficiencies (e.g., |
| | | | | | as described below), organ and tissue transplant |
| | | | | | rejection. |
| | | | | | Additional preferred indications include |
| | | | | | inflammation and inflammatory disorders. |
| | | | | | Preferred indications include anemia, pancytopenia, |
| | | | | | leukopenia, thrombocytopenia, Hodgkin's disease, |
| | | | | | acute lymphocytic anemia (ALL), plasmacytomas, |
| | | | | | multiple myeloma, Burkitt's lymphoma, Non- |
| | | | | | Hodgkin's lymphoma, Kaposi's sarcoma arthritis, |
| | | | | | granulomatous disease, inflammatory bowel disease, |
| | | | | | Hepatitis (e.g. Hepatitis C), sepsis, neutropenia, |
| | | | | | neutrophilia, psoriasis, hemophilia, hypercoagulation, |
| | | | | | diabetes mellitus, endocarditis, meningitis, Lyme |
| | | | | | Disease, asthma and allergy. |
| 89 | HECIB71 | 281 | Modulation | Assay to detect polypeptides of the invention | Highly preferred indications include neoplastic |
| | | | of | (including antibodies and agonists or antagonists | diseases (e.g., fibrosarcomas, leukemia, lymphoma, |
| | | | senescence, | of the invention) that induce (or repress) | and/or as described below under “Hyperproliferative |
| | | | particularly | senescence are well-known in the art and may be | Disorders”). Highly preferred indications include |
| | | | in fibroblast | used or routinely modified to assess the ability of | neoplasms and cancers, such as, for example, |
| | | | cells. | polypeptides of the invention (including | leukemia, lymphoma (e.g., T cell lymphoma, |
| | | | | antibodies and agonists or antagonists of the | Burkitt's lymphoma, non-Hodgkins lymphoma, |
| | | | | invention) to modulate senescence in vitro (e.g., in | Hodgkin's disease), melanoma, and prostate, breast, |
| | | | | fibroblast cell lines prone to early senescence). | lung, colon, pancreatic, stomach, brain, liver and |
| | | | | Factors that can affect cell senescence may have | urinary cancer. Other preferred indications include |
| | | | | utility in cancer, tissue regeneration and repair, | benign dysproliferative disorders and pre-neoplastic |
| | | | | and aging | conditions, such as, for example, hyperplasia, |
| | | | | | metaplasia, and/or dysplasia. |
| | | | | | Highly preferred indications also include wound |
| | | | | | healing and other disorders, pathologies, or treatments |
| | | | | | requiring tissue regeneration. |
| 92 | HEDDB56 | 284 | Production of | IL-2 FMAT. IL-2 is the principal T cell factor | A highly preferred embodiment of the invention |
| | | | IL-2 and | that allows T cell expansion and differentiation | includes a method for stimulating IL-2 production. An |
| | | | activation of | into effector cells. Assays for immunomodulatory | alternative highly preferred embodiment of the |
| | | | T cells; | proteins secreted by T cells that promote T cell | invention includes a method for inhibiting (e.g., |
| | | | particularly | and NK cell growth and differentiation are well | reducing) IL-2 production. |
| | | | wherein IL-2 | known in the art and may be used or routinely | A highly preferred embodiment of the invention |
| | | | secretion is | modified to assess the ability of polypeptides of | includes a method for stimulating T cell expansion. |
| | | | modulated by | the invention (including antibodies and agonists or | An alternative highly preferred embodiment of the |
| | | | contact with | antagonists of the invention) to mediate | invention includes a method for inhibiting T cell |
| | | | secreted | immunomodulation, promote immune cell growth | expansion. |
| | | | proteins in | and differentiation, and/or mediate humoral or | A highly preferred embodiment of the invention |
| | | | cell | cell-mediated immunity. Exemplary assays that | includes a method for stimulating T cell |
| | | | supernatents | test for immunomodulatory proteins evaluate the | differentiation. In a specific embodiment, this method |
| | | | and/or by | production of cytokines, such as IL-2, and the | stimulates T cell differentiation into effector cells. An |
| | | | contact with | activation of T cells. Such assays that may be | alternative highly preferred embodiment of the |
| | | | membrane | used or routinely modified to test | invention includes a method for inhibiting T cell |
| | | | bound | immunomodulatory activity of polypeptides of the | differentiation. In a specific embodiment, this method |
| | | | proteins | invention (including antibodies and agonists or | inhibits the differentiation of T cells into effector |
| | | | through in | antagonists of the invention) include the assays | cells. |
| | | | vitro cell-cell | disclosed in Miraglia et al., J Biomolecular | Highly preferred indications include neoplastic |
| | | | contact with | Screening 4: 193-204 (1999); Rowland et al., | diseases (e.g., melanoma, renal cell carcinoma, |
| | | | cells in co- | “Lymphocytes: a practical approach” Chapter | leukemia, lymphoma, and/or as described below |
| | | | culture, | 6: 138-160 (2000); Laduda et al., Immunology | under “Hyperproliferative Disorders”). Highly |
| | | | wherein the | 94(4): 496-502 (1998); and Powell et al., Immunol | preferred indications include neoplasms, such as, for |
| | | | co-cultured | Rev 165: 287-300 (1998), the contents of each of | example, melanoma (e.g., metastatic melanoma), |
| | | | cells express a | which are herein incorporated by reference in its | renal cell carcinoma (e.g., metastatic renal cell |
| | | | costimulatory | entirety. Highly preferred assays include those | carcinoma), leukemia, lymphoma (e.g., T cell |
| | | | transmembrane | wherein IL-2 production is tested for modulation | lymphoma), and prostate, breast, lung, colon, |
| | | | molecule. | by secreted proteins (in cell supernatents) or by | pancreatic, esophageal, stomach, brain, liver, ovarian, |
| | | | | cell-cell contact with membrane bound proteins | and urinary cancer. Other preferred indications |
| | | | | on cells in co-culture with T-cells, particularly | include benign dysproliferative disorders and pre- |
| | | | | wherein the co-cultured cells express a | neoplastic conditions, such as, for example, |
| | | | | transmembrane costimulatory molecule. Human | hyperplasia, metaplasia, and/or dysplasia. |
| | | | | T cells that may be used according to these assays | A highly preferred indication is infection (e.g., an |
| | | | | may be isolated using techniques disclosed herein | infectious disease as described below under |
| | | | | or otherwise known in the art. Human T cells are | “Infectious Disease”). A highly preferred indication is |
| | | | | primary human lymphocytes that mature in the | AIDS and HIV infection. |
| | | | | thymus and express a T cell receptor and CD3, | Additional highly preferred indications include |
| | | | | CD4, or CD8. These cells mediate humoral or | suppression of immune reactions to transplanted |
| | | | | cell-mediated immunity and may be preactivated | organs and/or tissues, uveitis, psoriasis, and tropical |
| | | | | to enhance responsiveness to immunomodulatory | spastic paraparesis. |
| | | | | factors. | Preferred indications include blood disorders |
| | | | | | (e.g., as described below under “Immune Activity”, |
| | | | | | “Blood-Related Disorders”, and/or “Cardiovascular |
| | | | | | Disorders”). Preferred indications include |
| | | | | | autoimmune diseases (e.g., rheumatoid arthritis, |
| | | | | | systemic lupus erythematosis, multiple sclerosis |
| | | | | | and/or as described below), immunodeficiencies (e.g., |
| | | | | | as described below), organ and tissue transplant |
| | | | | | rejection. |
| | | | | | Additional preferred indications include |
| | | | | | inflammation and inflammatory disorders. |
| | | | | | Preferred indications include anemia, pancytopenia, |
| | | | | | leukopenia, thrombocytopenia, Hodgkin's disease, |
| | | | | | acute lymphocytic anemia (ALL), plasmacytomas, |
| | | | | | multiple myeloma, Burkitt's lymphoma, Non- |
| | | | | | Hodgkin's lymphoma, Kaposi's sarcoma arthritis, |
| | | | | | granulomatous disease, inflammatory bowel disease, |
| | | | | | Hepatitis (e.g. Hepatitis C), sepsis, neutropenia, |
| | | | | | neutrophilia, psoriasis, hemophilia, hypercoagulation, |
| | | | | | diabetes mellitus, endocarditis, meningitis, Lyme |
| | | | | | Disease, asthma and allergy. |
| 97 | HECKK69 | 289 | Modulation | The cAMP signaling pathway is critical for | Highly preferred indications include neoplastic |
| | | | of cyclic- | osteoblast differentiation and functions in bone | diseases (e.g., osteosarcoma and other bone cancers, |
| | | | AMP | development. | leukemia, lymphoma, and/or as described below |
| | | | (cAMP) | Assays to detect polypeptides of the invention | under “Hyperproliferative Disorders”). Highly |
| | | | production; | (including antibodies and agonists or antagonists | preferred indications include neoplasms and cancers, |
| | | | particularly | of the invention) that induce (or repress) cell | such as, for example, leukemia, lymphoma (e.g., T |
| | | | in osteoblast | viability are well-known in the art and may be | cell lymphoma, Burkitt's lymphoma, non-Hodgkins |
| | | | cells and | used or routinely modified to assess the ability of | lymphoma, Hodgkin's disease), melanoma, and |
| | | | transformed | polypeptides of the invention (including | prostate, breast, lung, pancreatic, esophageal, |
| | | | osteoblast- | antibodies and agonists or antagonists of the | stomach, brain, liver and urinary cancer. Other |
| | | | like cell lines | invention) to modulate cell viability of | preferred indications include benign dysproliferative |
| | | | (e.g., rat | transformed cell lines in vitro (e.g., rat | disorders and pre-neoplastic conditions, such as, for |
| | | | osteosarcoma | osteosarcoma cell lines). | example, hyperplasia, metaplasia, and/or dysplasia. |
| | | | cell lines). | | |
| 98 | HEDEY26 | 290 | Production of | IFNgamma FMAT. IFNg plays a central role in | A highly preferred embodiment of the invention |
| | | | Interferon- | the immune system and is considered to be a | includes a method for stimulating the production of |
| | | | gamma | proinflammatory cytokine. IFNg promotes TH1 | IFNg. An alternative highly preferred embodiment of |
| | | | (IFNg) by T- | and inhibits TH2 differentiation; promotes IgG2a | the invention includes a method for inhibiting the |
| | | | cells; | and inhibits IgE secretion; induces macrophage | production of IFNg. |
| | | | particularly | activation; and increases MHC expression. | Highly preferred indications include blood |
| | | | wherein | Assays for immunomodulatory proteins produced | disorders (e.g., as described below under “Immune |
| | | | IFNg | by T cells and NK cells that regulate a variety of | Activity”, “Blood-Related Disorders”, and/or |
| | | | secretion is | inflammatory activities and inhibit TH2 helper | “Cardiovascular Disorders”), and infection (e.g., viral |
| | | | modulated by | cell functions are well known in the art and may | infections, tuberculosis, infections associated with |
| | | | contact with | be used or routinely modified to assess the ability | chronic granulomatosus disease and malignant |
| | | | secreted | of polypeptides of the invention (including | osteoporosis, and/or as described below under |
| | | | proteins in | antibodies and agonists or antagonists of the | “Infectious Disease”). Highly preferred indications |
| | | | cell | invention) to mediate immunomodulation, | include autoimmune disease (e.g., rheumatoid |
| | | | supernatents | regulate inflammatory activities, modulate TH2 | arthritis, systemic lupus erythematosis, multiple |
| | | | and/or by | helper cell function, and/or mediate humoral or | sclerosis and/or as described below), |
| | | | contact with | cell-mediated immunity. Exemplary assays that | immunodeficiency (e.g., as described below), |
| | | | membrane | test for immunomodulatory proteins evaluate the | boosting a T cell-mediated immune response, and |
| | | | bound | production of cytokines, such as Interferon | suppressing a T cell-mediated immune response. |
| | | | proteins | gamma (IFNg), and the activation of T cells. | Additional highly preferred indications include |
| | | | through in | Such assays that may be used or routinely | inflammation and inflammatory disorders. Additional |
| | | | vitro cell-cell | modified to test immunomodulatory activity of | preferred indications include idiopathic pulmonary |
| | | | contact. | polypeptides of the invention (including | fibrosis. Highly preferred indications include |
| | | | | antibodies and agonists or antagonists of the | neoplastic diseases (e.g., leukemia, lymphoma, |
| | | | | invention) include the assays disclosed in Miraglia | melanoma, and/or as described below under |
| | | | | et al., J Biomolecular Screening 4: 193-204 | “Hyperproliferative Disorders”). Highly preferred |
| | | | | (1999); Rowland et al., “Lymphocytes: a practical | indications include neoplasms and cancers, such as, |
| | | | | approach” Chapter 6: 138-160 (2000); Gonzalez et | for example, leukemia, lymphoma, melanoma, and |
| | | | | al., J Clin Lab Anal 8(5): 225-233 (1995); Billiau | prostate, breast, lung, colon, pancreatic, esophageal, |
| | | | | et al., Ann NY Acad Sci 856: 22-32 (1998); | stomach, brain, liver and urinary cancer. Other |
| | | | | Boehm et al., Annu Rev Immunol 15: 749-795 | preferred indications include benign dysproliferative |
| | | | | (1997), and Rheumatology (Oxford) 38(3): 214-20 | disorders and pre-neoplastic conditions, such as, for |
| | | | | (1999), the contents of each of which are herein | example, hyperplasia, metaplasia, and/or dysplasia. |
| | | | | incorporated by reference in its entirety. Human | Preferred indications include anemia, pancytopenia, |
| | | | | T cells that may be used according to these assays | leukopenia, thrombocytopenia, Hodgkin's disease, |
| | | | | may be isolated using techniques disclosed herein | acute lymphocytic anemia (ALL), plasmacytomas, |
| | | | | or otherwise known in the art. Human T cells are | multiple myeloma, Burkitt's lymphoma, arthritis, |
| | | | | primary human lymphocytes that mature in the | AIDS, granulomatous disease, inflammatory bowel |
| | | | | thymus and express a T Cell receptor and CD3, | disease, sepsis, neutropenia, neutrophilia, psoriasis, |
| | | | | CD4, or CD8. Highly preferred assays include | suppression of immune reactions to transplanted |
| | | | | those wherein IFNgamma production is tested for | organs and tissues, hemophilia, hypercoagulation, |
| | | | | modulation by secreted proteins (in cell | diabetes mellitus, endocarditis, meningitis, Lyme |
| | | | | supernatents) or by cell-cell contact with | Disease, asthma and allergy. |
| | | | | membrane bound proteins on cells in co-culture | |
| | | | | with T-cells. Human T-cells mediate humoral or | |
| | | | | cell-mediated immunity and may be preactivated | |
| | | | | to enhance responsiveness to immunomodulatory | |
| | | | | factors. | |
| 98 | HEDEY26 | 290 | Production of | IL-6 FMAT. IL-6 has strong effects on immune | A highly preferred embodiment of the invention |
| | | | IL-6 by | cells. For example, IL-6 participates in IL-4 | includes a method for stimulating IL-6 production. An |
| | | | endothelial | induced IgE production and increases IgA | alternative highly preferred embodiment of the |
| | | | cells (such as | production (IgA plays a role in mucosal | invention includes a method for inhibiting (e.g., |
| | | | Human | immunity). IL-6 induces cytotoxic T cells. | reducing) IL-6 production. |
| | | | Umbilical | Deregulated expression of IL-6 has been linked to | Highly preferred indications include |
| | | | Cord | autoimmune disease, plasmacytomas, myelomas, | immunological and inflammatory disorders (e.g., such |
| | | | Endothelial | and chronic hyperproliferative diseases. Assays | as allergy and asthma) and as described below under |
| | | | Cells). | for immunomodulatory and differentiation factor | “Immune Activity”, and “Blood-Related Disorders”. |
| | | | | proteins produced by a large variety of cells where | Highly preferred indications also include autoimmune |
| | | | | the expression level is strongly regulated by | disorders (e.g., rheumatoid arthritis, systemic lupus |
| | | | | cytokines, growth factors, and hormones are well | erythematosis, Crohn's disease, multiple sclerosis |
| | | | | known in the art and may be used or routinely | and/or as described below), neoplastic disorders (e.g., |
| | | | | modified to assess the ability of polypeptides of | organ cancers such as lung, liver, colon cancer, and/or |
| | | | | the invention (including antibodies and agonists or | as described below under “Hyperproliferative |
| | | | | antagonists of the invention) to mediate | Disorders”), and cardiovascular disorders (e.g. such as |
| | | | | immunomodulation and differentiation and | described below under “Cardiovascular Disorders”). |
| | | | | modulate T cell proliferation and function. | |
| | | | | Exemplary assays that test for immunomodulatory | |
| | | | | proteins evaluate the production of cytokines, | |
| | | | | such as IL-6, and the stimulation and upregulation | |
| | | | | of T cell proliferation and functional activities. | |
| | | | | Such assays that may be used or routinely | |
| | | | | modified to test immunomodulatory and | |
| | | | | differentiation activity of polypeptides of the | |
| | | | | invention (including antibodies and agonists or | |
| | | | | antagonists of the invention) include assays | |
| | | | | disclosed in Miraglia et al., J Biomolecular | |
| | | | | Screening 4: 193-204(1999); Rowland et al., | |
| | | | | “Lymphocytes: a practical approach” Chapter | |
| | | | | 6: 138-160 (2000); and Verhasselt et al., J | |
| | | | | Immunol 158: 2919-2925 (1997), the contents of | |
| | | | | each of which are herein incorporated by | |
| | | | | reference in its entirety. HUVECs are endothelial | |
| | | | | cells which line venous blood vessels, and are | |
| | | | | involved in functions that include, but are not | |
| | | | | limited to, angiogenesis, vascular permeability, | |
| | | | | vascular tone, and immune cell extravasation. | |
| | | | | Endothelial cells play a pivotal role in the | |
| | | | | initiation and perpetuation of inflammation and | |
| | | | | secretion of IL-6 may play an important role in | |
| | | | | recruitment and activation of immune cells such | |
| | | | | as neutrophils, macrophages, and lymphocytes. | |
| 101 | HEFHC80 | 293 | Modulation | Caspase Apoptosis. Assays for caspase apoptosis | A highly preferred embodiment of the invention |
| | | | of caspase | are well known in the art and may be used or | includes a method for stimulating apoptosis in |
| | | | activity; | routinely modified to assess the ability of | transformed, cancerous, or tumorigenic cells. An |
| | | | particularly | polypeptides of the invention (including | alternative highly preferred embodiment of the |
| | | | in | antibodies and agonists or antagonists of the | invention includes a method for inhibiting (e.g., |
| | | | transformed | invention) to promote or prevent caspase protease- | decreasing) apoptosis of normal cells (e.g., such to |
| | | | cells, such as | mediated apoptosis. Assays monitoring induction | increase the half-life of cells such as immune cells |
| | | | colon cancer | of apoptosis in transformed cells (such as a colon | (e.g., B-cells) in conditions wherein there is an |
| | | | cell lines, | cancer cell lines) is particularly valuable for | immune cell population deficiency). |
| | | | more | identifying polypeptides useful for treating | Highly preferred indications include neoplastic |
| | | | particularly | neoplasia. These assays may preferentially be | diseases (e.g., as described below under |
| | | | wherein | performed in the presence of a chemotherapeutic | “Hyperproliferative Disorders”), and disorders of the |
| | | | modulation | agent (e.g., paclitaxel) to enhance assay | immune and hematopoietic system (e.g., such as |
| | | | of caspase | sensitivity. Exemplary assays for caspase | described below under “Immune Activity”, and |
| | | | activity is | apoptosis that may be used or routinely modified | “Blood-Related Disorders). Preferred indications |
| | | | performed in | to test caspase apoptosis activity of polypeptides | include autoimmune diseases (e.g., rheumatoid |
| | | | the presence | of the invention (including antibodies and agonists | arthritis, systemic lupus erythematosis, multiple |
| | | | of a | or antagonists of the invention) include the assays | sclerosis and/or as described below) and |
| | | | chemotherapeutic | disclosed in Lee et al., FEBS Left 485(2-3): 122-126 | immunodeficiencies (e.g., as described below). |
| | | | agent | (2000); Nor et al., J Vasc Res 37(3): 209-218 | Additional preferred indications include inflammation |
| | | | (e.g., | (2000); and Karsan and Harlan, J Atheroscler | and inflammatory disorders (such as acute and chronic |
| | | | paclitaxel). | Thromb 3(2): 75-80 (1996); the contents of each | inflammatory diseases, e.g., inflammatory bowel |
| | | | | of which are herein incorporated by reference in | disease and Crohn's disease). |
| | | | | its entirety. Endothelial cells that may be used | |
| | | | | according to these assays are publicly available | |
| | | | | (e.g., through commercial sources). | |
| 103 | HEEMW15 | 295 | Production of | IL-10 FMAT. Assays for immunomodulatory | A highly preferred embodiment of the invention |
| | | | IL-10; | proteins produced by activated T cells, B cells, | includes a method for stimulating IL-10 production. |
| | | | particularly | and monocytes that exhibit anti-inflammatory | An alternative highly preferred embodiment of the |
| | | | wherein IL- | activity and downregulate monocyte/macrophage | invention includes a method for inhibiting (e.g., |
| | | | 10 secretion | function and expression of cytokines are well | reducing) IL-10 production. |
| | | | is modulated | known in the art and may be used or routinely | Highly preferred indications include |
| | | | by contact | modified to assess the ability of the polypeptides | inflammation and inflammatory disorders (e.g. |
| | | | with secreted | of the invention (including antibodies and agonists | inflammatory bowel disease). Additional highly |
| | | | proteins in | or antagonists of the invention) to mediate | preferred indications include blood disorders (e.g., as |
| | | | cell | immunomodulation, regulate inflammatory | described below under “Immune Activity” (e.g. |
| | | | supernatents | activities, and modulate immune cell function and | autoimmune disorders), “Blood-Related Disorders”, |
| | | | and/or by | cytokine production. Exemplary assays that test | and/or “Cardiovascular Disorders”). Highly preferred |
| | | | contact with | for immunomodulatory proteins evaluate the | indications also include autoimmune diseases (e.g., |
| | | | membrane | production of cytokines, such as IL-10, and the | rheumatoid arthritis, systemic lupus erythematosis, |
| | | | bound | downmodulation of immune responses. Such | multiple sclerosis and/or as described below) and |
| | | | proteins | assays that may be used or routinely modified to | immunodeficiencies (e.g., as described below). |
| | | | through in | test immunomodulatory activity of polypeptides | Preferred indications include neoplastic diseases |
| | | | vitro cell-cell | of the invention (including antibodies and agonists | (e.g., leukemia, lymphoma, melanoma, and/or as |
| | | | contact with | or antagonists of the invention) include the assays | described below under “Hyperproliferative |
| | | | cells in co- | disclosed in Miraglia et al., J Biomolecular | Disorders”). Preferred indications include neoplasms |
| | | | culture, | Screening 4: 193-204 (1999); Rowland et al., | and cancers, such as, for example, leukemia, |
| | | | wherein the | “Lymphocytes: a practical approach” Chapter | lymphoma, melanoma, and prostate, breast, lung, |
| | | | co-cultured | 6: 138-160 (2000); and Koning et al., Cytokine | colon, pancreatic, esophageal, stomach, brain, liver |
| | | | cells express a | 9(6): 427-436 (1997), the contents of each of | and urinary cancer. Other preferred indications |
| | | | costimulatory | which are herein incorporated by reference in its | include benign dysproliferative disorders and pre- |
| | | | transmembrane | entirety. Human T cells that may be used | neoplastic conditions, such as, for example, |
| | | | molecule. | according to these assays may be isolated using | hyperplasia, metaplasia, and/or dysplasia. |
| | | | | techniques disclosed herein or otherwise known in | Preferred indications include anemia, |
| | | | | the art. Human T cells are primary human | pancytopenia, leukopenia, thrombocytopenia, |
| | | | | lymphocytes that mature in the thymus and | Hodgkin's disease, acute lymphocytic anemia (ALL), |
| | | | | express a T cell receptor and CD3, CD4, or CD8. | plasmacytomas, multiple myeloma, Burkitt's |
| | | | | These cells mediate humoral or cell-mediated | lymphoma, Crohn's disease, arthritis, AIDS, |
| | | | | immunity and may be preactivated to enhance | granulomatous disease, sepsis, neutropenia, |
| | | | | responsiveness to immunomodulatory factors. | neutrophilia, psoriasis, suppression of immune |
| | | | | Highly preferred assays include those wherein IL- | reactions to transplanted organs and tissues, |
| | | | | 2 production is tested for modulation by secreted | hemophilia, hypercoagulation, diabetes mellitus, |
| | | | | proteins (in cell supernatents) or by cell-cell | endocarditis, meningitis, Lyme Disease, asthma and |
| | | | | contact with membrane bound proteins on cells in | allergy. |
| | | | | co-culture with T-cells, particularly wherein the | An additional preferred indication is infection |
| | | | | co-cultured cells express a transmembrane | (e.g., as described below under “Infectious Disease”). |
| | | | | costimulatory molecule. | |
| 104 | HMFIH88 | 296 | Production of | Vascular endothelial growth factor (VEGF) is | Highly preferred indications include neoplastic diseases |
| | | | Vascular | strong promoter of angiogenesis, the growth of | wherein angiogenesis promotes disease progression (e.g., |
| | | | Endothelial | new blood vessels from pre-existing vessels, | solid tumor cancers including but not limited to |
| | | | Growth | which can contribute to the development of | melanoma, prostate, breast, lung, pancreatic, esophageal, |
| | | | Factor | numerous types of tumors, and the formation of | stomach, brain, liver and urinary tract cancers, and/or as |
| | | | (VEGF), | metastases. In order to grow, tumors need new | described below under “Hyperproliferative Disorders”). |
| | | | particularly | blood vessels to form so that they can feed | Other preferred indications include benign |
| | | | in | themselves. Control of tumor angiogenesis is a | dysproliferative disorders and pre-neoplastic conditions, |
| | | | fibrosarcoma | prime therapeutic target for cancer therapy. | such as, for example, hyperplasia, metaplasia, and/or |
| | | | cell lines. | Assays to detect polypeptides of the invention | dysplasia. |
| | | | | (including antibodies and agonists or antagonists | |
| | | | | of the invention) that induce (or repress) VEGF | |
| | | | | production are well-known in the art and may be | |
| | | | | used or routinely modified to assess the ability of | |
| | | | | polypeptides of the invention (including | |
| | | | | antibodies and agonists or antagonists of the | |
| | | | | invention) to modulate VEGF production in vitro | |
| | | | | (e.g., human fibrosarcoma cell lines). | |
| 104 | HMFIH88 | 296 | Modulation | Caspase Apoptosis. Assays for caspase apoptosis | A highly preferred embodiment of the invention |
| | | | of caspase | are well known in the art and may be used or | includes a method for stimulating apoptosis in |
| | | | activity; | routinely modified to assess the ability of | transformed, cancerous, or tumorigenic cells. An |
| | | | particularly | polypeptides of the invention (including | alternative highly preferred embodiment of the |
| | | | in | antibodies and agonists or antagonists of the | invention includes a method for inhibiting (e.g., |
| | | | transformed | invention) to promote or prevent caspase protease- | decreasing) apoptosis of normal cells (e.g., such to |
| | | | cells, such as | mediated apoptosis. Assays monitoring induction | increase the half-life of cells such as immune cells |
| | | | colon cancer | of apoptosis in transformed cells (such as a colon | (e.g., B-cells) in conditions wherein there is an |
| | | | cell lines, | cancer cell lines) is particularly valuable for | immune cell population deficiency). |
| | | | more | identifying polypeptides useful for treating | Highly preferred indications include neoplastic |
| | | | particularly | neoplasia. These assays may preferentially be | diseases (e.g., as described below under |
| | | | wherein | performed in the presence of a chemotherapeutic | “Hyperproliferative Disorders”), and disorders of the |
| | | | modulation | agent (e.g., paclitaxel) to enhance assay | immune and hematopoietic system (e.g., such as |
| | | | of caspase | sensitivity. Exemplary assays for caspase | described below under “Immune Activity”, and |
| | | | activity is | apoptosis that may be used or routinely modified | “Blood-Related Disorders). Preferred indications |
| | | | performed in | to test caspase apoptosis activity of polypeptides | include autoimmune diseases (e.g., rheumatoid |
| | | | the presence | of the invention (including antibodies and agonists | arthritis, systemic lupus erythematosis, multiple |
| | | | of a | or antagonists of the invention) include the assays | sclerosis and/or as described below) and |
| | | | chemotherapeutic | disclosed in Lee et al., FEBS Lett 485(2-3): 122-126 | immunodeficiencies (e.g., as described below). |
| | | | agent | (2000); Nor et al., J Vasc Res 37(3): 209-218 | Additional preferred indications include inflammation |
| | | | (e.g., | (2000); and Karsan and Harlan, J Atheroscler | and inflammatory disorders (such as acute and chronic |
| | | | paclitaxel). | Thromb 3(2): 75-80 (1996); the contents of each | inflammatory diseases, e.g., inflammatory bowel |
| | | | | of which are herein incorporated by reference in | disease and Crohn's disease). |
| | | | | its entirety. Endothelial cells that may be used | |
| | | | | according to these assays are publicly available | |
| | | | | (e.g., through commercial sources). | |
| 104 | HMFIH88 | 296 | Modulation | CXCR4 is a G-protein-coupled, 7-transmembrane | Highly preferred indications include neoplastic |
| | | | of CXCR4 | domain receptor thought to play a critical role in | diseases (e.g., as described below under |
| | | | expression; | motility, homing and proliferation of cancer cells | “Hyperproliferative Disorders”), blood disorders (e.g., |
| | | | particularly | at specific metastatic sites. CXCR4 is also is a | as described below under “Immune Activity” and/or |
| | | | in | major co-receptor for T-cell-tropic HIV-1 strains, | “Blood-Related Disorders”), immune disorders (e.g., |
| | | | transformed | and thus an important mediator of cell | as described below under “Immune Activity”) and |
| | | | cells, e.g., | entry/infection by HIV. Exemplary assays that | infections (e.g., as described below under “Infectious |
| | | | such as colon | may be used or routinely modified to monitor | Disease”), particularly HIV infection. |
| | | | cancer cell | modulation of CXCR4 expression by polypeptides | Highly preferred indications also include |
| | | | lines. | of the invention (including antibodies and agonists | autoimmune diseases (e.g., rheumatoid arthritis, |
| | | | | or antagonists of the invention) are well known by | systemic lupus erythematosis, multiple sclerosis |
| | | | | those of ordinary skill in the art. In particular, | and/or as described below) and immunodeficiencies |
| | | | | assays that measure modulation of CXCR4 | (e.g., as described below). Additional highly |
| | | | | expression in transformed cells, such as colon | preferred indications include inflammation and |
| | | | | cancer cells, are useful for identification of | inflammatory disorders. Highly preferred |
| | | | | polypeptides (including antibodies and agonists or | indications also include cancers such as, kidney, |
| | | | | antagonists of the invention) which may be used | melanoma, prostate, breast, lung, colon, pancreatic, |
| | | | | in treatment of cancer and other neoplasias. | esophageal, stomach, brain, liver, urinary cancer, |
| | | | | Similarly, assays that measure modulation of | lymphoma and leukemias. Other preferred indications |
| | | | | CXCR4 expression in immune cells, such as T- | include benign dysproliferative disorders and pre- |
| | | | | cells, are useful for identification of polypeptides | neoplastic conditions, such as, for example, |
| | | | | (including antibodies and agonists or antagonists | hyperplasia, metaplasia, and/or dysplasia. Other |
| | | | | of the invention) which may be used in treatment | highly preferred indications include, pancytopenia, |
| | | | | of HIV/AIDS. | leukopenia, leukemias, Hodgkin's disease, acute |
| | | | | | lymphocytic anemia (ALL), arthritis, asthma, |
| | | | | | HIV/AIDS, granulomatous disease, inflammatory |
| | | | | | bowel disease, sepsis, psoriasis, immune reactions to |
| | | | | | transplanted organs and tissues, endocarditis, |
| | | | | | meningitis, Lyme Disease, and allergies. |
| 105 | HEFJN45 | 297 | Modulation | Caspase Apoptosis. Assays for caspase apoptosis | A highly preferred embodiment of the invention |
| | | | of caspase | are well known in the art and may be used or | includes a method for stimulating apoptosis in |
| | | | activity; | routinely modified to assess the ability of | transformed, cancerous, or tumorigenic cells. An |
| | | | particularly | polypeptides of the invention (including | alternative highly preferred embodiment of the |
| | | | in | antibodies and agonists or antagonists of the | invention includes a method for inhibiting (e.g., |
| | | | transformed | invention) to promote or prevent caspase protease- | decreasing) apoptosis of normal cells (e.g., such to |
| | | | cells, such as | mediated apoptosis. Assays monitoring induction | increase the half-life of cells such as immune cells |
| | | | colon cancer | of apoptosis in transformed cells (such as a colon | (e.g., B-cells) in conditions wherein there is an |
| | | | cell lines, | cancer cell lines) is particularly valuable for | immune cell population deficiency). |
| | | | more | identifying polypeptides useful for treating | Highly preferred indications include neoplastic |
| | | | particularly | neoplasia. These assays may preferentially be | diseases (e.g., as described below under |
| | | | wherein | performed in the presence of a chemotherapeutic | “Hyperproliferative Disorders”), and disorders of the |
| | | | modulation | agent (e.g., paclitaxel) to enhance assay | immune and hematopoietic system (e.g., such as |
| | | | of caspase | sensitivity. Exemplary assays for caspase | described below under “Immune Activity”, and |
| | | | activity is | apoptosis that may be used or routinely modified | “Blood-Related Disorders). Preferred indications |
| | | | performed in | to test caspase apoptosis activity of polypeptides | include autoimmune diseases (e.g., rheumatoid |
| | | | the presence | of the invention (including antibodies and agonists | arthritis, systemic lupus erythematosis, multiple |
| | | | of a | or antagonists of the invention) include the assays | sclerosis and/or as described below) and |
| | | | chemotherapeutic | disclosed in Lee et al., FEBS Lett 485(2-3): 122-126 | immunodeficiencies (e.g., as described below). |
| | | | agent | (2000); Nor et al., J Vasc Res 37(3): 209-218 | Additional preferred indications include inflammation |
| | | | (e.g., | (2000); and Karsan and Harlan, J Atheroscler | and inflammatory disorders (such as acute and chronic |
| | | | paclitaxel). | Thromb 3(2): 75-80 (1996); the contents of each | inflammatory diseases, e.g., inflammatory bowel |
| | | | | of which are herein incorporated by reference in | disease and Crohn's disease). |
| | | | | its entirety. Endothelial cells that may be used | |
| | | | | according to these assays are publicly available | |
| | | | | (e.g., through commercial sources). | |
| 107 | HEGLH36 | 299 | Production of | Assays for measuring expression of VCAM are | Highly preferred indications include inflammation (acute |
| | | | VCAM in | well-known in the art and may be used or | and chronic), restnosis, atherosclerosis, asthma and |
| | | | endothelial | routinely modified to assess the ability of | allergy. Highly preferred indications include |
| | | | cells (such as | polypeptides of the invention (including | inflammation and inflammatory disorders, |
| | | | human | antibodies and agonists or antagonists of the | immunological disorders, neoplastic disorders (e.g. |
| | | | umbilical | invention) to regulate VCAM expression. For | cancer/tumorigenesis), and cardiovascular disorders |
| | | | vein | example, FMAT may be used to meaure the | (such as described below under “Immune Activity”, |
| | | | endothelial | upregulation of cell surface VCAM-1 expresssion | “Blood-Related Disorders”, “Hyperproliferative |
| | | | cells | in endothelial cells. Endothelial cells are cells | Disorders” and/or “Cardiovascular Disorders”). Highly |
| | | | (HUVEC)) | that line blood vessels, and are involved in | preferred indications include neoplasms and cancers such |
| | | | | functions that include, but are not limited to, | as, for example, leukemia, lymphoma, melanoma, renal |
| | | | | angiogenesis, vascular permeability, vascular | cell carcinoma, and prostate, breast, lung, colon, |
| | | | | tone, and immune cell extravasation. Exemplary | pancreatic, esophageal, stomach, brain, liver and urinary |
| | | | | endothelial cells that may be used according to | cancer. Other preferred indications include benign |
| | | | | these assays include human umbilical vein | dysproliferative disorders and pre-neoplastic conditions, |
| | | | | endothelial cells (HUVEC), which are available | such as, for example, hyperplasia, metaplasia, and/or |
| | | | | from commercial sources. The expression of | dysplasia. |
| | | | | VCAM (CD106), a membrane-associated protein, | |
| | | | | can be upregulated by cytokines or other factors, | |
| | | | | and contributes to the extravasation of | |
| | | | | lymphocytes, leucocytes and other immune cells | |
| | | | | from blood vessels; thus VCAM expression plays | |
| | | | | a role in promoting immune and inflammatory | |
| | | | | responses. | |
| 108 | HMFHX51 | 300 | Modulation | CXCR4 is a G-protein-coupled, 7-transmembrane | Highly preferred indications include neoplastic |
| | | | of CXCR4 | domain receptor thought to play a critical role in | diseases (e.g., as described below under |
| | | | expression; | motility, homing and proliferation of cancer cells | “Hyperproliferative Disorders”), blood disorders (e.g., |
| | | | particularly | at specific metastatic sites. CXCR4 is also is a | as described below under “Immune Activity” and/or |
| | | | in | major co-receptor for T-cell-tropic HIV-1 strains, | “Blood-Related Disorders”), immune disorders (e.g., |
| | | | transformed | and thus an important mediator of cell | as described below under “Immune Activity”) and |
| | | | cells, e.g., | entry/infection by HIV. Exemplary assays that | infections (e.g., as described below under “Infectious |
| | | | such as | may be used or routinely modified to monitor | Disease”), particularly HIV infection. |
| | | | fibrosarcoma | modulation of CXCR4 expression by polypeptides | Highly preferred indications also include |
| | | | cell lines. | of the invention (including antibodies and agonists | autoimmune diseases (e.g., rheumatoid arthritis, |
| | | | | or antagonists of the invention) are well known by | systemic lupus erythematosis, multiple sclerosis |
| | | | | those of ordinary skill in the art. In particular, | and/or as described below) and immunodeficiencies |
| | | | | assays that measure modulation of CXCR4 | (e.g., as described below). Additional highly |
| | | | | expression in transformed cells, such as | preferred indications include inflammation and |
| | | | | fibrosarcoma cells, are useful for identification of | inflammatory disorders. Highly preferred |
| | | | | polypeptides (including antibodies and agonists or | indications also include cancers such as, kidney, |
| | | | | antagonists of the invention) which may be used | melanoma, prostate, breast, lung, colon, pancreatic, |
| | | | | in treatment of cancer and other neoplasias. | esophageal, stomach, brain, liver, urinary cancer, |
| | | | | Similarly, assays that measure modulation of | lymphoma and leukemias. Other preferred indications |
| | | | | CXCR4 expression in immune cells, such as T- | include benign dysproliferative disorders and pre- |
| | | | | cells, are useful for identification of polypeptides | neoplastic conditions, such as, for example, |
| | | | | (including antibodies and agonists or antagonists | hyperplasia, metaplasia, and/or dysplasia. Other |
| | | | | of the invention) which may be used in treatment | highly preferred indications include, pancytopenia, |
| | | | | of HIV/AIDS. | leukopenia, leukemias, Hodgkin's disease, acute |
| | | | | | lymphocytic anemia (ALL), arthritis, asthma, |
| | | | | | HIV/AIDS, granulomatous disease, inflammatory |
| | | | | | bowel disease, sepsis, psoriasis, immune reactions to |
| | | | | | transplanted organs and tissues, endocarditis, |
| | | | | | meningitis, Lyme Disease, and allergies. |
| 108 | HMFHX51 | 300 | Modulation | Caspase Apoptosis. Assays for caspase apoptosis | A highly preferred embodiment of the invention |
| | | | of caspase | are well known in the art and may be used or | includes a method for stimulating apoptosis in |
| | | | activity; | routinely modified to assess the ability of | transformed, cancerous, or tumorigenic cells. An |
| | | | particularly | polypeptides of the invention (including | alternative highly preferred embodiment of the |
| | | | in | antibodies and agonists or antagonists of the | invention includes a method for inhibiting (e.g., |
| | | | transformed | invention) to promote or prevent caspase protease- | decreasing) apoptosis of normal cells (e.g., such to |
| | | | cells, such as | mediated apoptosis. Assays monitoring induction | increase the half-life of cells such as immune cells |
| | | | colon cancer | of apoptosis in transformed cells (such as a colon | (e.g., B-cells) in conditions wherein there is an |
| | | | cell lines, | cancer cell lines) is particularly valuable for | immune cell population deficiency). |
| | | | more | identifying polypeptides useful for treating | Highly preferred indications include neoplastic |
| | | | particularly | neoplasia. These assays may preferentially be | diseases (e.g., as described below under |
| | | | wherein | performed in the presence of a chemotherapeutic | “Hyperproliferative Disorders”), and disorders of the |
| | | | modulation | agent (e.g., paclitaxel) to enhance assay | immune and hematopoietic system (e.g., such as |
| | | | of caspase | sensitivity. Exemplary assays for caspase | described below under “Immune Activity”, and |
| | | | activity is | apoptosis that may be used or routinely modified | “Blood-Related Disorders). Preferred indications |
| | | | performed in | to test caspase apoptosis activity of polypeptides | include autoimmune diseases (e.g., rheumatoid |
| | | | the presence | of the invention (including antibodies and agonists | arthritis, systemic lupus erythematosis, multiple |
| | | | of a | or antagonists of the invention) include the assays | sclerosis and/or as described below) and |
| | | | chemotherapeutic | disclosed ih Lee et al., FEBS Lett 485(2-3): 122-126 | immunodeficiencies (e.g., as described below). |
| | | | agent | (2000); Nor et al., J Vasc Res 37(3): 209-218 | Additional preferred indications include inflammation |
| | | | (e.g., | (2000); and Karsan and Harlan, J Atheroscler | and inflammatory disorders (such as acute and chronic |
| | | | paclitaxel). | Thromb 3(2): 75-80 (1996); the contents of each | inflammatory diseases, e.g., inflammatory bowel |
| | | | | of which are herein incorporated by reference in | disease and Crohn's disease). |
| | | | | its entirety. Endothelial cells that may be used | |
| | | | | according to these assays are publicly available | |
| | | | | (e.g., through commercial sources). | |
| 109 | HEIDS26 | 301 | Modulation | Assays for the activation of transcription through | A highly preferred indication is diabetes mellitus. |
| | | | of cAMP- | the cAMP-Response Element (CRE) are well- | Additional highly preferred indications include |
| | | | Response | known in the art and may be used or routinely | complications associated with diabetes (e.g., diabetic |
| | | | Element | modified to assess the ability of polypeptides of | retinopathy, diabetic nephropathy, kidney disease |
| | | | (CRE) in | the invention (including antibodies and agonists or | (e.g., renal failure, nephropathy and/or other diseases |
| | | | adipocytes. | antagonists of the invention) to regulate the CRE | and disorders as described in the “Renal Disorders” |
| | | | | and modulate the expression of genes involved in | section below), diabetic neuropathy, nerve disease and |
| | | | | cell metabolism, proliferation, and growth. | nerve damage (e.g., due to diabetic neuropathy), blood |
| | | | | Polypeptides of the invention (including | vessel blockage, heart disease, stroke, impotence (e.g., |
| | | | | antibodies and agonists or antagonists of the | due to diabetic neuropathy or blood vessel blockage), |
| | | | | invention) that modulate CRE activation may be | seizures, mental confusion, drowsiness, nonketotic |
| | | | | important for metabolic and growth disorders such | hyperglycemic-hyperosmolar coma, cardiovascular |
| | | | | as obesity and diabetes. | disease (e.g., heart disease, atherosclerosis, |
| | | | | | microvascular disease, hypertension, stroke, and other |
| | | | | | diseases and disorders as described in the |
| | | | | | “Cardiovascular Disorders” section below), |
| | | | | | dyslipidemia, endocrine disorders (as described in the |
| | | | | | “Endocrine Disorders” section below), neuropathy, |
| | | | | | vision impairment (e.g., diabetic retinopathy and |
| | | | | | blindness), ulcers and impaired wound healing, and |
| | | | | | infection (e.g., infectious diseases and disorders as |
| | | | | | described in the “Infectious Diseases” section below, |
| | | | | | especially of the urinary tract and skin). An |
| | | | | | additional highly preferred indication is obesity and/or |
| | | | | | complications associated with obesity. Additional |
| | | | | | highly preferred indications include weight loss or |
| | | | | | alternatively, weight gain. Additional highly |
| | | | | | preferred indications are complications associated |
| | | | | | with insulin resistance. |
| 110 | HMFHL01 | 302 | Production of | IL-2 FMAT. IL-2 is the principal T cell factor | A highly preferred embodiment of the invention |
| | | | IL-2 and | that allows T cell expansion and differentiation | includes a method for stimulating IL-2 production. An |
| | | | activation of | into effector cells. Assays for immunomodulatory | alternative highly preferred embodiment of the |
| | | | T cells; | proteins secreted by T cells that promote T cell | invention includes a method for inhibiting (e.g., |
| | | | particularly | and NK cell growth and differentiation are well | reducing) IL-2 production. |
| | | | wherein IL-2 | known in the art and may be used or routinely | A highly preferred embodiment of the invention |
| | | | secretion is | modified to assess, the ability of polypeptides of | includes a method for stimulating T cell expansion. |
| | | | modulated by | the invention (including antibodies and agonists or | An alternative highly preferred embodiment of the |
| | | | contact with | antagonists of the invention) to mediate | invention includes a method for inhibiting T cell |
| | | | secreted | immunomodulation, promote immune cell growth | expansion. |
| | | | proteins in | and differentiation, and/or mediate humoral or | A highly preferred embodiment of the invention |
| | | | cell | cell-mediated immunity. Exemplary assays that | includes a method for stimulating T cell |
| | | | supernatents | test for immunomodulatory proteins evaluate the | differentiation. In a specific embodiment, this method |
| | | | and/or by | production of cytokines, such as IL-2, and the | stimulates T cell differentiation into effector cells. An |
| | | | contact with | activation of T cells. Such assays that may be | alternative highly preferred embodiment of the |
| | | | membrane | used or routinely modified to test | invention includes a method for inhibiting T cell |
| | | | bound | immunomodulatory activity of polypeptides of the | differentiation. In a specific embodiment, this method |
| | | | proteins | invention (including antibodies and agonists or | inhibits the differentiation of T cells into effector |
| | | | through in | antagonists of the invention) include the assays | cells. |
| | | | vitro cell-cell | disclosed in Miraglia et al., J Biomolecular | Highly preferred indications include neoplastic |
| | | | contact with | Screening 4: 193-204 (1999); Rowland et al., | diseases (e.g., melanoma, renal cell carcinoma, |
| | | | cells in co- | “Lymphocytes: a practical approach” Chapter | leukemia, lymphoma, and/or as described below |
| | | | culture, | 6: 138-160 (2000); Laduda et al., Immunology | under “Hyperproliferative Disorders”). Highly |
| | | | wherein the | 94(4): 496-502 (1998); and Powell et al., Immunol | preferred indications include neoplasms, such as, for |
| | | | co-cultured | Rev 165: 287-300 (1998), the contents of each of | example, melanoma (e.g., metastatic melanoma), |
| | | | cells express a | which are herein incorporated by reference in its | renal cell carcinoma (e.g., metastatic renal cell |
| | | | costimulatory | entirety. Highly preferred assays include those | carcinoma), leukemia, lymphoma (e.g., T cell |
| | | | transmembrane | wherein IL-2 production is tested for modulation | lymphoma), and prostate, breast, lung, colon, |
| | | | molecule. | by secreted proteins (in cell supernatents) or by | pancreatic, esophageal, stomach, brain, liver, ovarian, |
| | | | | cell-cell contact with membrane bound proteins | and urinary cancer. Other preferred indications |
| | | | | on cells in co-culture with T-cells, particularly | include benign dysproliferative disorders and pre- |
| | | | | wherein the co-cultured cells express a | neoplastic conditions, such as, for example, |
| | | | | transmembrane costimulatory molecule. Human | hyperplasia, metaplasia, and/or dysplasia. |
| | | | | T cells that may be used according to these assays | A highly preferred indication is infection (e.g., an |
| | | | | may be isolated using techniques disclosed herein | infectious disease as described below under |
| | | | | or otherwise known in the art. Human T cells are | “Infectious Disease”). A highly preferred indication is |
| | | | | primary human lymphocytes that mature in the | AIDS and HIV infection. |
| | | | | thymus and express a T cell receptor and CD3, | Additional highly preferred indications include |
| | | | | CD4, or CD8. These cells mediate humoral or | suppression of immune reactions to transplanted |
| | | | | cell-mediated immunity and may be preactivated | organs and/or tissues, uveitis, psoriasis, and tropical |
| | | | | to enhance responsiveness to immunomodulatory | spastic paraparesis. |
| | | | | factors. | Preferred indications include blood disorders |
| | | | | | (e.g., as described below under “Immune Activity”, |
| | | | | | “Blood-Related Disorders”, and/or “Cardiovascular |
| | | | | | Disorders”). Preferred indications include |
| | | | | | autoimmune diseases (e.g., rheumatoid arthritis, |
| | | | | | systemic lupus erythematosis, multiple sclerosis |
| | | | | | and/or as described below), immunodeficiencies (e.g., |
| | | | | | as described below), organ and tissue transplant |
| | | | | | rejection. |
| | | | | | Additional preferred indications include |
| | | | | | inflammation and inflammatory disorders. |
| | | | | | Preferred indications include anemia, pancytopenia, |
| | | | | | leukopenia, thrombocytopenia, Hodgkin's disease, |
| | | | | | acute lymphocytic anemia (ALL), plasmacytomas, |
| | | | | | multiple myeloma, Burkitt's lymphoma, Non- |
| | | | | | Hodgkin's lymphoma, Kaposi's sarcoma arthritis, |
| | | | | | granulomatous disease, inflammatory bowel disease, |
| | | | | | Hepatitis (e.g. Hepatitis C), sepsis, neutropenia, |
| | | | | | neutrophilia, psoriasis, hemophilia, hypercoagulation, |
| | | | | | diabetes mellitus, endocarditis, meningitis, Lyme |
| | | | | | Disease, asthma and allergy. |
| 112 | HEIDA30 | 304 | Production of | IL-10 FMAT. Assays for immunomodulatory | A highly preferred embodiment of the invention |
| | | | IL-10; | proteins produced by activated T cells, B cells, | includes a method for stimulating IL-10 production. |
| | | | particularly | and monocytes that exhibit anti-inflammatory | An alternative highly preferred embodiment of the |
| | | | wherein IL- | activity and downregulate monocyte/macrophage | invention includes a method for inhibiting (e.g., |
| | | | 10 secretion | function and expression of cytokines are well | reducing) IL-10 production. |
| | | | is modulated | known in the art and may be used or routinely | Highly preferred indications include |
| | | | by contact | modified to assess the ability of the polypeptides | inflammation and inflammatory disorders (e.g. |
| | | | with secreted | of the invention (including antibodies and agonists | inflammatory bowel disease). Additional highly |
| | | | proteins in | or antagonists of the invention) to mediate | preferred indications include blood disorders (e.g., as |
| | | | cell | immunomodulation, regulate inflammatory | described below under “Immune Activity” (e.g. |
| | | | supernatents | activities, and modulate immune cell function and | autoimmune disorders), “Blood-Related Disorders”, |
| | | | and/or by | cytokine production. Exemplary assays that test | and/or “Cardiovascular Disorders”). Highly preferred |
| | | | contact with | for immunomodulatory proteins evaluate the | indications also include autoimmune diseases (e.g., |
| | | | membrane | production of cytokines, such as IL-10, and the | rheumatoid arthritis, systemic lupus erythematosis, |
| | | | bound | downmodulation of immune responses. Such | multiple sclerosis and/or as described below) and |
| | | | proteins | assays that may be used or routinely modified to | immunodeficiencies (e.g., as described below). |
| | | | through in | test immunomodulatory activity of polypeptides | Preferred indications include neoplastic diseases |
| | | | vitro cell-cell | of the invention (including antibodies and agonists | (e.g., leukemia, lymphoma, melanoma, and/or as |
| | | | contact with | or antagonists of the invention) include the assays | described below under “Hyperproliferative |
| | | | cells in co- | disclosed in Miraglia et al., J Biomolecular | Disorders”). Preferred indications include neoplasms |
| | | | culture, | Screening 4: 193-204 (1999); Rowland et al., | and cancers, such as, for example, leukemia, |
| | | | wherein the | “Lymphocytes: a practical approach” Chapter | lymphoma, melanoma, and prostate, breast, lung, |
| | | | co-cultured | 6: 138-160 (2000); and Koning et al., Cytokine | colon, pancreatic, esophageal, stomach, brain, liver |
| | | | cells express a | 9(6): 427-436 (1997), the contents of each of | and urinary cancer. Other preferred indications |
| | | | costimulatory | which are herein incorporated by reference in its | include benign dysproliferative disorders and pre- |
| | | | transmembrane | entirety. Human T cells that may be used | neoplastic conditions, such as, for example, |
| | | | molecule. | according to these assays may be isolated using | hyperplasia, metaplasia, and/or dysplasia. |
| | | | | techniques disclosed herein or otherwise known in | Preferred indications include anemia, |
| | | | | the art. Human T cells are primary human | pancytopenia, leukopenia, thrombocytopenia, |
| | | | | lymphocytes that mature in the thymus and | Hodgkin's disease, acute lymphocytic anemia (ALL), |
| | | | | express a T cell receptor and CD3, CD4, or CD8. | plasmacytomas, multiple myeloma, Burkitt's |
| | | | | These cells mediate humoral or cell-mediated | lymphoma, Crohn's disease, arthritis, AIDS, |
| | | | | immunity and may be preactivated to enhance | granulomatous disease, sepsis, neutropenia, |
| | | | | responsiveness to immunomodulatory factors. | neutrophilia, psoriasis, suppression of immune |
| | | | | Highly preferred assays include those wherein IL- | reactions to transplanted organs and tissues, |
| | | | | 2 production is tested for modulation by secreted | hemophilia, hypercoagulation, diabetes mellitus, |
| | | | | proteins (in cell supernatents) or by cell-cell | endocarditis, meningitis, Lyme Disease, asthma and |
| | | | | contact with membrane bound proteins on cells in | allergy. |
| | | | | co-culture with T-cells, particularly wherein the | An additional preferred indication is infection |
| | | | | co-cultured cells express a transmembrane | (e.g., as described below under “Infectious Disease”). |
| | | | | costimulatory molecule. | |
| 112 | HEIDA30 | 304 | Modulation | Assay to detect polypeptides of the invention | Highly preferred indications include neoplastic |
| | | | of cell | (including antibodies and agonists or antagonists | diseases (e.g., colon cancer, leukemia, lymphoma, |
| | | | viability in | of the invention) that induce (or repress) cell | and/or as described below under “Hyperproliferative |
| | | | carcinoma | viability are well-known in the art and may be | Disorders”). Highly preferred indications include |
| | | | cells (such | used or routinely modified to assess the ability of | neoplasms and cancers, such as, for example, |
| | | | as, for | polypeptides of the invention (including | leukemia, lymphoma (e.g., T cell lymphoma, |
| | | | example, a | antibodies and agonists or antagonists of the | Burkitt's lymphoma, non-Hodgkins lymphoma, |
| | | | human colon | invention) to modulate cell viability of | Hodgkin's disease), melanoma, and prostate, breast, |
| | | | carcinoma | transformed cell lines in vitro (e.g., human colon | lung, pancreatic, esophageal, stomach, brain, liver |
| | | | cell line); | carcinoma cell lines). Agents that directly induce | and urinary cancer. Other preferred indications |
| | | | more | cancer cell death may be used as anti-tumor | include benign dysproliferative disorders and pre- |
| | | | particularly | therapeutics. To enhance sensitivity of cell | neoplastic conditions, such as, for example, |
| | | | wherein | viability assays, the assays may be run in | hyperplasia, metaplasia, and/or dysplasia. |
| | | | modulation | combination with a chemotherapeutic agent (e.g., | |
| | | | of cell | camptothecin). | |
| | | | viability is | | |
| | | | performed in | | |
| | | | the presence | | |
| | | | of a | | |
| | | | chemotherapeutic | | |
| | | | agent | | |
| | | | (e.g., | | |
| | | | camptothecin). | | |
| 115 | HEHXL26 | 307 | Modulation | CXCR4 is a G-protein-coupled, 7-transmembrane | Highly preferred indications include neoplastic |
| | | | of CXCR4 | domain receptor thought to play a critical role in | diseases (e.g., as described below under |
| | | | expression; | motility, homing and proliferation of cancer cells | “Hyperproliferative Disorders”), blood disorders (e.g., |
| | | | particularly | at specific metastatic sites. CXCR4 is also is a | as described below under “Immune Activity” and/or |
| | | | in | major co-receptor for T-cell-tropic HIV-1 strains, | “Blood-Related Disorders”), immune disorders (e.g., |
| | | | transformed | and thus an important mediator of cell | as described below under “Immune Activity”) and |
| | | | cells, e.g., | entry/infection by HIV. Exemplary assays that | infections (e.g., as described below under “Infectious |
| | | | such as | may be used or routinely modified to monitor | Disease”), particularly HIV infection. |
| | | | fibrosarcoma | modulation of CXCR4 expression by polypeptides | Highly preferred indications also include |
| | | | cell lines. | of the invention (including antibodies and agonists | autoimmune diseases (e.g., rheumatoid arthritis, |
| | | | | or antagonists of the invention) are well known by | systemic lupus erythematosis, multiple sclerosis |
| | | | | those of ordinary skill in the art. In particular, | and/or as described below) and immunodeficiencies |
| | | | | assays that measure modulation of CXCR4 | (e.g., as described below). Additional highly |
| | | | | expression in transformed cells, such as | preferred indications include inflammation and |
| | | | | fibrosarcoma cells, are useful for identification of | inflammatory disorders. Highly preferred |
| | | | | polypeptides (including antibodies and agonists or | indications also include cancers such as, kidney, |
| | | | | antagonists of the invention) which may be used | melanoma, prostate, breast, lung, colon, pancreatic, |
| | | | | in treatment of cancer and other neoplasias. | esophageal, stomach, brain, liver, urinary cancer, |
| | | | | Similarly, assays that measure modulation of | lymphoma and leukemias. Other preferred indications |
| | | | | CXCR4 expression in immune cells, such as T- | include benign dysproliferative disorders and pre- |
| | | | | cells, are useful for identification of polypeptides | neoplastic conditions, such as, for example, |
| | | | | (including antibodies and agonists or antagonists | hyperplasia, metaplasia, and/or dysplasia. Other |
| | | | | of the invention) which may be used in treatment | highly preferred indications include, pancytopenia, |
| | | | | of HIV/AIDS. | leukopenia, leukemias, Hodgkin's disease, acute |
| | | | | | lymphocytic anemia (ALL), arthritis, asthma, |
| | | | | | HIV/AIDS, granulomatous disease, inflammatory |
| | | | | | bowel disease, sepsis, psoriasis, immune reactions to |
| | | | | | transplanted organs and tissues, endocarditis, |
| | | | | | meningitis, Lyme Disease, and allergies. |
| 115 | HEHXL26 | 307 | Production of | IL-10 FMAT. Assays for immunomodulatory | A highly preferred embodiment of the invention |
| | | | IL-10; | proteins produced by activated T cells, B cells, | includes a method for stimulating IL-10 production. |
| | | | particularly | and monocytes that exhibit anti-inflammatory | An alternative highly preferred embodiment of the |
| | | | wherein IL- | activity and downregulate monocyte/macrophage | invention includes a method for inhibiting (e.g., |
| | | | 10 secretion | function and expression of cytokines are well | reducing) IL-10 production. |
| | | | is modulated | known in the art and may be used or routinely | Highly preferred indications include |
| | | | by contact | modified to assess the ability of the polypeptides | inflammation and inflammatory disorders (e.g. |
| | | | with secreted | of the invention (including antibodies and agonists | inflammatory bowel disease). Additional highly |
| | | | proteins in | or antagonists of the invention) to mediate | preferred indications include blood disorders (e.g., as |
| | | | cell | immunomodulation, regulate inflammatory | described below under “Immune Activity” (e.g. |
| | | | supernatents | activities, and modulate immune cell function and | autoimmune disorders), “Blood-Related Disorders”, |
| | | | and/or by | cytokine production. Exemplary assays that test | and/or “Cardiovascular Disorders”). Highly preferred |
| | | | contact with | for immunomodulatory proteins evaluate the | indications also include autoimmune diseases (e.g., |
| | | | membrane | production of cytokines, such as IL-10, and the | rheumatoid arthritis, systemic lupus erythematosis, |
| | | | bound | downmodulation of immune responses. Such | multiple sclerosis and/or as described below) and |
| | | | proteins | assays that may be used or routinely modified to | immunodeficiencies (e.g., as described below). |
| | | | through in | test immunomodulatory activity of polypeptides | Preferred indications include neoplastic diseases |
| | | | vitro cell-cell | of the invention (including antibodies and agonists | (e.g., leukemia, lymphoma, melanoma, and/or as |
| | | | contact with | or antagonists of the invention) include the assays | described below under “Hyperproliferative |
| | | | cells in co- | disclosed in Miraglia et al., J Biomolecular | Disorders”). Preferred indications include neoplasms |
| | | | culture, | Screening 4: 193-204 (1999); Rowland et al., | and cancers, such as, for example, leukemia, |
| | | | wherein the | “Lymphocytes: a practical approach” Chapter | lymphoma, melanoma, and prostate, breast, lung, |
| | | | co-cultured | 6: 138-160 (2000); and Koning et al., Cytokine | colon, pancreatic, esophageal, stomach, brain, liver |
| | | | cells express a | 9(6): 427-436 (1997), the contents of each of | and urinary cancer. Other preferred indications |
| | | | costimulatory | which are herein incorporated by reference in its | include benign dysproliferative disorders and pre- |
| | | | transmembrane | entirety. Human T cells that may be used | neoplastic conditions, such as, for example, |
| | | | molecule. | according to these assays may be isolated using | hyperplasia, metaplasia, and/or dysplasia. |
| | | | | techniques disclosed herein or otherwise known in | Preferred indications include anemia, |
| | | | | the art. Human T cells are primary human | pancytopenia, leukopenia, thrombocytopenia, |
| | | | | lymphocytes that mature in the thymus and | Hodgkin's disease, acute lymphocytic anemia (ALL), |
| | | | | express a T cell receptor and CD3, CD4, or CD8. | plasmacytomas, multiple myeloma, Burkitt's |
| | | | | These cells mediate humoral or cell-mediated | lymphoma, Crohn's disease, arthritis, AIDS, |
| | | | | immunity and may be preactivated to enhance | granulomatous disease, sepsis, neutropenia, |
| | | | | responsiveness to immunomodulatory factors. | neutrophilia, psoriasis, suppression of immune |
| | | | | Highly preferred assays include those wherein IL- | reactions to transplanted organs and tissues, |
| | | | | 2 production is tested for modulation by secreted | hemophilia, hypercoagulation, diabetes mellitus, |
| | | | | proteins (in cell supernatents) or by cell-cell | endocarditis, meningitis, Lyme Disease, asthma and |
| | | | | contact with membrane bound proteins on cells in | allergy. |
| | | | | co-culture with T-cells, particularly wherein the | An additional preferred indication is infection |
| | | | | co-cultured cells express a transmembrane | (e.g., as described below under “Infectious Disease”). |
| | | | | costimulatory molecule. | |
| 116 | HEENT17 | 308 | Production of | IL-2 FMAT. IL-2 is the principal T cell factor | A highly preferred embodiment of the invention |
| | | | IL-2 and | that allows T cell expansion and differentiation | includes a method for stimulating IL-2 production. An |
| | | | activation of | into effector cells. Assays for immunomodulatory | alternative highly preferred embodiment of the |
| | | | T cells; | proteins secreted by T cells that promote T cell | invention includes a method for inhibiting (e.g., |
| | | | particularly | and NK cell growth and differentiation are well | reducing) IL-2 production. |
| | | | wherein IL-2 | known in the art and may be used or routinely | A highly preferred embodiment of the invention |
| | | | secretion is | modified to assess the ability of polypeptides of | includes a method for stimulating T cell expansion. |
| | | | modulated by | the invention (including antibodies and agonists or | An alternative highly preferred embodiment of the |
| | | | contact with | antagonists of the invention) to mediate | invention includes a method for inhibiting T cell |
| | | | secreted | immunomodulation, promote immune cell growth | expansion. |
| | | | proteins in | and differentiation, and/or mediate humoral or | A highly preferred embodiment of the invention |
| | | | cell | cell-mediated immunity. Exemplary assays that | includes a method for stimulating T cell |
| | | | supernatents | test for immunomodulatory proteins evaluate the | differentiation. In a specific embodiment, this method |
| | | | and/or by | production of cytokines, such as IL-2, and the | stimulates T cell differentiation into effector cells. An |
| | | | contact with | activation of T cells. Such assays that may be | alternative highly preferred embodiment of the |
| | | | membrane | used or routinely modified to test | invention includes a method for inhibiting T cell |
| | | | bound | immunomodulatory activity of polypeptides of the | differentiation. In a specific embodiment, this method |
| | | | proteins | invention (including antibodies and agonists or | inhibits the differentiation of T cells into effector |
| | | | through in | antagonists of the invention) include the assays | cells. |
| | | | vitro cell-cell | disclosed in Miraglia et al., J Biomolecular | Highly preferred indications include neoplastic |
| | | | contact with | Screening 4: 193-204 (1999); Rowland et al., | diseases (e.g., melanoma, renal cell carcinoma, |
| | | | cells in co- | “Lymphocytes: a practical approach” Chapter | leukemia, lymphoma, and/or as described below |
| | | | culture, | 6: 138-160 (2000); Laduda et al., Immunology | under “Hyperproliferative Disorders”). Highly |
| | | | wherein the | 94(4): 496-502 (1998); and Powell et al., Immunol | preferred indications include neoplasms, such as, for |
| | | | co-cultured | Rev 165: 287-300 (1998), the contents of each of | example, melanoma (e.g., metastatic melanoma), |
| | | | cells express a | which are herein incorporated by reference in its | renal cell carcinoma (e.g., metastatic renal cell |
| | | | costimulatory | entirety. Highly preferred assays include those | carcinoma), leukemia, lymphoma (e.g., T cell |
| | | | transmembrane | wherein IL-2 production is tested for modulation | lymphoma), and prostate, breast, lung, colon, |
| | | | molecule. | by secreted proteins (in cell supernatents) or by | pancreatic, esophageal, stomach, brain, liver, ovarian, |
| | | | | cell-cell contact with membrane bound proteins | and urinary cancer. Other preferred indications |
| | | | | on cells in co-culture with T-cells, particularly | include benign dysproliferative disorders and pre- |
| | | | | wherein the co-cultured cells express a | neoplastic conditions, such as, for example, |
| | | | | transmembrane costimulatory molecule. Human | hyperplasia, metaplasia, and/or dysplasia. |
| | | | | T cells that may be used according to these assays | A highly preferred indication is infection (e.g., an |
| | | | | may be isolated using techniques disclosed herein | infectious disease as described below under |
| | | | | or otherwise known in the art. Human T cells are | “Infectious Disease”). A highly preferred indication is |
| | | | | primary human lymphocytes that mature in the | AIDS and HIV infection. |
| | | | | thymus and express a T cell receptor and CD3, | Additional highly preferred indications include |
| | | | | CD4, or CD8. These cells mediate humoral or | suppression of immune reactions to transplanted |
| | | | | cell-mediated immunity and may be preactivated | organs and/or tissues, uveitis, psoriasis, and tropical |
| | | | | to enhance responsiveness to immunomodulatory | spastic paraparesis. |
| | | | | factors. | Preferred indications include blood disorders |
| | | | | | (e.g., as described below under “Immune Activity”, |
| | | | | | “Blood-Related Disorders”, and/or “Cardiovascular |
| | | | | | Disorders”). Preferred indications include |
| | | | | | autoimmune diseases (e.g., rheumatoid arthritis, |
| | | | | | systemic lupus erythematosis, multiple sclerosis |
| | | | | | and/or as described below), immunodeficiencies (e.g., |
| | | | | | as described below), organ and tissue transplant |
| | | | | | rejection. |
| | | | | | Additional preferred indications include |
| | | | | | inflammation and inflammatory disorders. |
| | | | | | Preferred indications include anemia, pancytopenia, |
| | | | | | leukopenia, thrombocytopenia, Hodgkin's disease, |
| | | | | | acute lymphocytic anemia (ALL), plasmacytomas, |
| | | | | | multiple myeloma, Burkitt's lymphoma, Non- |
| | | | | | Hodgkin's lymphoma, Kaposi's sarcoma arthritis, |
| | | | | | granulomatous disease, inflammatory bowel disease, |
| | | | | | Hepatitis (e.g. Hepatitis C), sepsis, neutropenia, |
| | | | | | neutrophilia, psoriasis, hemophilia, hypercoagulation, |
| | | | | | diabetes mellitus, endocarditis, meningitis, Lyme |
| | | | | | Disease, asthma and allergy. |
| 117 | HEFHB48 | 309 | Production of | IFNgamma FMAT. IFNg plays a central role in | A highly preferred embodiment of the invention |
| | | | Interferon- | the immune system and is considered to be a | includes a method for stimulating the production of |
| | | | gamma | proinflammatory cytokine. IFNg promotes TH1 | IFNg. An alternative highly preferred embodiment of |
| | | | (IFNg) by T- | and inhibits TH2 differentiation; promotes IgG2a | the invention includes a method for inhibiting the |
| | | | cells; | and inhibits IgE secretion; induces macrophage | production of IFNg. |
| | | | particularly | activation; and increases MHC expression. | Highly preferred indications include blood |
| | | | wherein | Assays for immunomodulatory proteins produced | disorders (e.g., as described below under “Immune |
| | | | IFNg | by T cells and NK cells that regulate a variety of | Activity”, “Blood-Related Disorders”, and/or |
| | | | secretion is | inflammatory activities and inhibit TH2 helper | “Cardiovascular Disorders”), and infection (e.g., viral |
| | | | modulated by | cell functions are well known in the art and may | infections, tuberculosis, infections associated with |
| | | | contact with | be used or routinely modified to assess the ability | chronic granulomatosus disease and malignant |
| | | | secreted | of polypeptides of the invention (including | osteoporosis, and/or as described below under |
| | | | proteins in | antibodies and agonists or antagonists of the | “Infectious Disease”). Highly preferred indications |
| | | | cell | invention) to mediate immunomodulation, | include autoimmune disease (e.g., rheumatoid |
| | | | supernatents | regulate inflammatory activities, modulate TH2 | arthritis, systemic lupus erythematosis, multiple |
| | | | and/or by | helper cell function, and/or mediate humoral or | sclerosis and/or as described below), |
| | | | contact with | cell-mediated immunity. Exemplary assays that | immunodeficiency (e.g., as described below), |
| | | | membrane | test for immunomodulatory proteins evaluate the | boosting a T cell-mediated immune response, and |
| | | | bound | production of cytokines, such as Interferon | suppressing a T cell-mediated immune response. |
| | | | proteins | gamma (IFNg), and the activation of T cells. | Additional highly preferred indications include |
| | | | through in | Such assays that may be used or routinely | inflammation and inflammatory disorders. Additional |
| | | | vitro cell-cell | modified to test immunomodulatory activity of | preferred indications include idiopathic pulmonary |
| | | | contact. | polypeptides of the invention (including | fibrosis. Highly preferred indications include |
| | | | | antibodies and agonists or antagonists of the | neoplastic diseases (e.g., leukemia, lymphoma, |
| | | | | invention) include the assays disclosed in Miraglia | melanoma, and/or as described below under |
| | | | | et al., J Biomolecular Screening 4: 193-204 | “Hyperproliferative Disorders”). Highly preferred |
| | | | | (1999); Rowland et al., “Lymphocytes: a practical | indications include neoplasms and cancers, such as, |
| | | | | approach” Chapter 6: 138-160 (2000); Gonzalez et | for example, leukemia, lymphoma, melanoma, and |
| | | | | al., J Clin Lab Anal 8(5): 225-233 (1995); Billiau | prostate, breast, lung, colon, pancreatic, esophageal, |
| | | | | et al., Ann NY Acad Sci 856: 22-32 (1998); | stomach, brain, liver and urinary cancer. Other |
| | | | | Boehm et al., Annu Rev Immunol 15: 749-795 | preferred indications include benign dysproliferative |
| | | | | (1997), and Rheumatology (Oxford) 38(3): 214-20 | disorders and pre-neoplastic conditions, such as, for |
| | | | | (1999), the contents of each of which are herein | example, hyperplasia, metaplasia, and/or dysplasia. |
| | | | | incorporated by reference in its entirety. Human | Preferred indications include anemia, pancytopenia, |
| | | | | T cells that may be used according to these assays | leukopenia, thrombocytopenia, Hodgkin's disease, |
| | | | | may be isolated using techniques disclosed herein | acute lymphocytic anemia (ALL), plasmacytomas, |
| | | | | or otherwise known in the art. Human T cells are | multiple myeloma, Burkitt's lymphoma, arthritis, |
| | | | | primary human lymphocytes that mature in the | AIDS, granulomatous disease, inflammatory bowel |
| | | | | thymus and express a T Cell receptor and CD3, | disease, sepsis, neutropenia, neutrophilia, psoriasis, |
| | | | | CD4, or CD8. Highly preferred assays include | suppression of immune reactions to transplanted |
| | | | | those wherein IFNgamma production is tested for | organs and tissues, hemophilia, hypercoagulation, |
| | | | | modulation by secreted proteins (in cell | diabetes mellitus, endocarditis, meningitis, Lyme |
| | | | | supernatents) or by cell-cell contact with | Disease, asthma and allergy. |
| | | | | membrane bound proteins on cells in co-culture | |
| | | | | with T-cells. Human T-cells mediate humoral or | |
| | | | | cell-mediated immunity and may be preactivated | |
| | | | | to enhance responsiveness to immunomodulatory | |
| | | | | factors. | |
| 122 | HEHMJ47 | 314 | Production of | Vascular endothelial growth factor (VEGF) is | Highly preferred indications include neoplastic diseases |
| | | | Vascular | strong promoter of angiogenesis, the growth of | wherein angiogenesis promotes disease progression (e.g., |
| | | | Endothelial | new blood vessels from pre-existing vessels, | solid tumor cancers including but not limited to |
| | | | Growth | which can contribute to the development of | melanoma, prostate, breast, lung, pancreatic, esophageal, |
| | | | Factor | numerous types of tumors, and the formation of | stomach, brain, liver and urinary tract cancers, and/or as |
| | | | (VEGF), | metastases. In order to grow, tumors need new | described below under “Hyperproliferative Disorders”). |
| | | | particularly | blood vessels to form so that they can feed | Other preferred indications include benign |
| | | | in | themselves. Control of tumor angiogenesis is a | dysproliferative disorders and pre-neoplastic conditions, |
| | | | fibrosarcoma | prime therapeutic target for cancer therapy. | such as, for example, hyperplasia, metaplasia, and/or |
| | | | cell lines. | Assays to detect polypeptides of the invention | dysplasia. |
| | | | | (including antibodies and agonists or antagonists | |
| | | | | of the invention) that induce (or repress) VEGF | |
| | | | | production are well-known in the art and may be | |
| | | | | used or routinely modified to assess the ability of | |
| | | | | polypeptides. of the invention (including | |
| | | | | antibodies and agonists or antagonists of the | |
| | | | | invention) to modulate VEGF production in vitro | |
| | | | | (e.g., human fibrosarcoma cell lines). | |
| 124 | HMFHV45 | 316 | Production of | Interleukin (IL)-8 is important to immune | A highly preferred embodiment of the invention |
| | | | IL-8 by | responses associated with inflammation, infection | includes a method for stimulating IL-8 production. An |
| | | | transformed | and tumor growth, metastasis and angiogenic | alternative highly preferred embodiment of the |
| | | | cell lines (for | responses. Reports have shown that immuno- | invention includes a method for inhibiting (e.g., |
| | | | example, | modulatory mediators such as IL8 may modify | reducing) IL-8 production. |
| | | | colon cancer | the expression of cell-to-cell or cell-to-matrix | Highly preferred indications include cancer and |
| | | | cell lines. | adhesion proteins, implicated in the determination | other neoplastic disorders (e.g., organ cancers such as |
| | | | | of aggressiveness and metastasis of colon cancer | colon, lung, and liver cancer, and/or as described |
| | | | | cells. | below under “Hyperproliferative Disorders”). |
| | | | | Assays measuring production of IL-8 are well | Highly preferred indications also include Immune |
| | | | | known in the art and may be used or routinely | disorders (e.g. immunological and inflammatory |
| | | | | modified to assess the ability of polypeptides of | disorders such as allergy, asthma, leukemia, etc.) as |
| | | | | the invention (including antibodies and agonists or | described below under “Immune Activity”, and |
| | | | | antagonists of the invention) to regulate | “Blood-Related Disorders”. |
| | | | | production and/or secretion of IL-8. For example, | |
| | | | | FMAT may be used or routinely modified to | |
| | | | | assess the ability of polypeptides of the invention | |
| | | | | (including antibodies and agonists or antagonists | |
| | | | | of the invention) to regulate production and/or | |
| | | | | secretion of IL-8 from transformed cells (such as | |
| | | | | colon cancer cell lines). IL-8 may play an | |
| | | | | important role in recruitment and activation of | |
| | | | | immune cells such as neutrophils, macrophages, | |
| | | | | and lymphocytes. | |
| 125 | HECJZ57 | 317 | Production of | IL-10 FMAT. Assays for immunomodulatory | A highly preferred embodiment of the invention |
| | | | IL-10; | proteins produced by activated T cells, B cells, | includes a method for stimulating IL-10 production. |
| | | | particularly | and monocytes that exhibit anti-inflammatory | An alternative highly preferred embodiment of the |
| | | | wherein IL- | activity and downregulate monocyte/macrophage | invention includes a method for inhibiting (e.g., |
| | | | 10 secretion | function and expression of cytokines are well | reducing) IL-10 production. |
| | | | is modulated | known in the art and may be used or routinely | Highly preferred indications include |
| | | | by contact | modified to assess the ability of the polypeptides | inflammation and inflammatory disorders (e.g. |
| | | | with secreted | of the invention (including antibodies and agonists | inflammatory bowel disease). Additional highly |
| | | | proteins in | or antagonists of the invention) to mediate | preferred indications include blood disorders (e.g., as |
| | | | cell | immunomodulation, regulate inflammatory | described below under “Immune Activity” (e.g. |
| | | | supernatents | activities, and modulate immune cell function and | autoimmune disorders), “Blood-Related Disorders”, |
| | | | and/or by | cytokine production. Exemplary assays that test | and/or “Cardiovascular Disorders”). Highly preferred |
| | | | contact with | for immunomodulatory proteins evaluate the | indications also include autoimmune diseases (e.g., |
| | | | membrane | production of cytokines, such as IL-10, and the | rheumatoid arthritis, systemic lupus erythematosis, |
| | | | bound | downmodulation of immune responses. Such | multiple sclerosis and/or as described below) and |
| | | | proteins | assays that may be used or routinely modified to | immunodeficiencies (e.g., as described below). |
| | | | through in | test immunomodulatory activity of polypeptides | Preferred indications include neoplastic diseases |
| | | | vitro cell-cell | of the invention (including antibodies and agonists | (e.g., leukemia, lymphoma, melanoma, and/or as |
| | | | contact with | or antagonists of the invention) include the assays | described below under “Hyperproliferative |
| | | | cells in co- | disclosed in Miraglia et al., J Biomolecular | Disorders”). Preferred indications include neoplasms |
| | | | culture, | Screening 4: 193-204 (1999); Rowland et al., | and cancers, such as, for example, leukemia, |
| | | | wherein the | “Lymphocytes: a practical approach” Chapter | lymphoma, melanoma, and prostate, breast, lung, |
| | | | co-cultured | 6: 138-160 (2000); and Koning et al., Cytokine | colon, pancreatic, esophageal, stomach, brain, liver |
| | | | cells express a | 9(6): 427-436 (1997), the contents of each of | and urinary cancer. Other preferred indications |
| | | | costimulatory | which are herein incorporated by reference in its | include benign dysproliferative disorders and pre- |
| | | | transmembrane | entirety. Human T cells that may be used | neoplastic conditions, such as, for example, |
| | | | molecule. | according to these assays may be isolated using | hyperplasia, metaplasia, and/or dysplasia. |
| | | | | techniques disclosed herein or otherwise known in | Preferred indications include anemia, |
| | | | | the art. Human T cells are primary human | pancytopenia, leukopenia, thrombocytopenia, |
| | | | | lymphocytes that mature in the thymus and | Hodgkin's disease, acute lymphocytic anemia (ALL), |
| | | | | express a T cell receptor and CD3, CD4, or CD8. | plasmacytomas, multiple myeloma, Burkitt's |
| | | | | These cells mediate humoral or cell-mediated | lymphoma, Crohn's disease, arthritis, AIDS, |
| | | | | immunity and may be preactivated to enhance | granulomatous disease, sepsis, neutropenia, |
| | | | | responsiveness to immunomodulatory factors. | neutrophilia, psoriasis, suppression of immune |
| | | | | Highly preferred assays include those wherein IL- | reactions to transplanted organs and tissues, |
| | | | | 2 production is tested for modulation by secreted | hemophilia, hypercoagulation, diabetes mellitus, |
| | | | | proteins (in cell supernatents) or by cell-cell | endocarditis, meningitis, Lyme Disease, asthma and |
| | | | | contact with membrane bound proteins on cells in | allergy. |
| | | | | co-culture with T-cells, particularly wherein the | An additional preferred indication is infection |
| | | | | co-cultured cells express a transmembrane | (e.g., as described below under “Infectious Disease”). |
| | | | | costimulatory molecule. | |
| 126 | HEFJW14 | 318 | Production of | RANTES FMAT. Assays for immunomodulatory | A highly preferred embodiment of the invention |
| | | | RANTES | proteins that induce chemotaxis of T cells, | includes a method for stimulating (e.g., increasing) |
| | | | chemokine; | monocytes, and eosinophils are well known in the | RANTES production. An alternative highly preferred |
| | | | particularly | art and may be used or routinely modified to | embodiment of the invention includes a method for |
| | | | in endothelial | assess the ability of polypeptides of the invention | inhibiting (e.g., reducing) RANTES production. |
| | | | cells, such as | (including antibodies and agonists or antagonists | Highly preferred indications include allergy, |
| | | | human | of the invention) to mediate immunomodulation, | asthma, inflammation and inflammatory disorders, |
| | | | umbilical | induce chemotaxis, and/or mediate humoral or | immunological disorders, and neoplastic disorders |
| | | | vein | cell-mediated immunity. Exemplary assays that | (e.g. cancer/tumorigenesis) such as described below |
| | | | endothelial | test for immunomodulatory proteins evaluate the | under “Cardiovascular Disorders”, “Immune |
| | | | cells | production of cytokines, such as RANTES, and | Activity”, “Blood-Related Disorders”, and/or |
| | | | (HUVEC). | the induction of chemotactic responses in immune | “Hyperproliferative Disorders”). Highly preferred |
| | | | | cells. Such assays that may be used or routinely | indications also include autoimmune diseases (e.g., |
| | | | | modified to test immunomodulatory activity of | rheumatoid arthritis, systemic lupus erythematosis, |
| | | | | polypeptides of the invention (including | multiple sclerosis and/or as described below) and |
| | | | | antibodies and agonists or antagonists of the | immunodeficiencies (e.g., as described below). |
| | | | | invention) include the assays disclosed in Miraglia | Preferred indications also include neoplastic |
| | | | | et al., J Biomolecular Screening 4: 193-204 | diseases (e.g., leukemia, lymphoma, and/or as |
| | | | | (1999); Rowland et al., “Lymphocytes: a practical | described below under “Hyperproliferative |
| | | | | approach” Chapter 6: 138-160 (2000): Cocchi et | Disorders”). Highly preferred indications include |
| | | | | al., Science 270(5243): 1811-1815 (1995); and | neoplasms and cancers, such as, leukemia, lymphoma, |
| | | | | Robinson et al., Clin Exp Immunol 101(3): 398-407 | prostate, breast, lung, colon, pancreatic, esophageal, |
| | | | | (1995), the contents of each of which are | stomach, brain, liver, and urinary cancer. Other |
| | | | | herein incorporated by reference in its entirety. | preferred indications include benign dysproliferative |
| | | | | Human umbilical vein endothelial cells (HUVEC) | disorders and pre-neoplastic conditions, such as, for |
| | | | | may be used according to these assays and may be | example, hyperplasia, metaplasia, and/or dysplasia. |
| | | | | isolated using techniques readily known in the art. | |
| 128 | HMFHE73 | 320 | Production of | IL-2 FMAT. IL-2 is the principal T cell factor | A highly preferred embodiment of the invention |
| | | | IL-2 and | that allows T cell expansion and differentiation | includes a method for stimulating IL-2 production. An |
| | | | activation of | into effector cells. Assays for immunomodulatory | alternative highly preferred embodiment of the |
| | | | T cells; | proteins secreted by T cells that promote T cell | invention includes a method for inhibiting (e.g., |
| | | | particularly | and NK cell growth and differentiation are well | reducing) IL-2 production. |
| | | | wherein IL-2 | known in the art and may be used or routinely | A highly preferred embodiment of the invention |
| | | | secretion is | modified to assess the ability of polypeptides of | includes a method for stimulating T cell expansion. |
| | | | modulated by | the invention (including antibodies and agonists or | An alternative highly preferred embodiment of the |
| | | | contact with | antagonists of the invention) to mediate | invention includes a method for inhibiting T cell |
| | | | secreted | immunomodulation, promote immune cell growth | expansion. |
| | | | proteins in | and differentiation, and/or mediate humoral or | A highly preferred embodiment of the invention |
| | | | cell | cell-mediated immunity. Exemplary assays that | includes a method for stimulating T cell |
| | | | supernatents | test for immunomodulatory proteins evaluate the | differentiation. In a specific embodiment, this method |
| | | | and/or by | production of cytokines, such as IL-2, and the | stimulates T cell differentiation into effector cells. An |
| | | | contact with | activation of T cells. Such assays that may be | alternative highly preferred embodiment of the |
| | | | membrane | used or routinely modified to test | invention includes a method for inhibiting T cell |
| | | | bound | immunomodulatory activity of polypeptides of the | differentiation. In a specific embodiment, this method |
| | | | proteins | invention (including antibodies and agonists or | inhibits the differentiation of T cells into effector |
| | | | through in | antagonists of the invention) include the assays | cells. |
| | | | vitro cell-cell | disclosed in Miraglia et al., J Biomolecular | Highly preferred indications include neoplastic |
| | | | contact with | Screening 4: 193-204 (1999); Rowland et al., | diseases (e.g., melanoma, renal cell carcinoma, |
| | | | cells in co- | “Lymphocytes: a practical approach” Chapter | leukemia, lymphoma, and/or as described below |
| | | | culture, | 6: 138-160 (2000); Laduda et al., Immunology | under “Hyperproliferative Disorders”). Highly |
| | | | wherein the | 94(4): 496-502 (1998); and Powell et al., Immunol | preferred indications include neoplasms, such as, for |
| | | | co-cultured | Rev 165: 287-300 (1998), the contents of each of | example, melanoma (e.g., metastatic melanoma), |
| | | | cells express a | which are herein incorporated by reference in its | renal cell carcinoma (e.g., metastatic renal cell |
| | | | costimulatory | entirety. Highly preferred assays include those | carcinoma), leukemia, lymphoma (e.g., T cell |
| | | | transmembrane | wherein IL-2 production is tested for modulation | lymphoma), and prostate, breast, lung, colon, |
| | | | molecule. | by secreted proteins (in cell supernatents) or by | pancreatic, esophageal, stomach, brain, liver, ovarian, |
| | | | | cell-cell contact with membrane bound proteins | and urinary cancer. Other preferred indications |
| | | | | on cells in co-culture with T-cells, particularly | include benign dysproliferative disorders and pre- |
| | | | | wherein the co-cultured cells express a | neoplastic conditions, such as, for example, |
| | | | | transmembrane costimulatory molecule. Human | hyperplasia, metaplasia, and/or dysplasia. |
| | | | | T cells that may be used according to these assays | A highly preferred indication is infection (e.g., an |
| | | | | may be isolated using techniques disclosed herein | infectious disease as described below under |
| | | | | or otherwise known in the art. Human T cells are | “Infectious Disease”). A highly preferred indication is |
| | | | | primary human lymphocytes that mature in the | AIDS and HIV infection. |
| | | | | thymus and express a T cell receptor and CD3, | Additional highly preferred indications include |
| | | | | CD4, or CD8. These cells mediate humoral or | suppression of immune reactions to transplanted |
| | | | | cell-mediated immunity and may be preactivated | organs and/or tissues, uveitis, psoriasis, and tropical |
| | | | | to enhance responsiveness to immunomodulatory | spastic paraparesis. |
| | | | | factors. | Preferred indications include blood disorders |
| | | | | | (e.g., as described below under “Immune Activity”, |
| | | | | | “Blood-Related Disorders”, and/or “Cardiovascular |
| | | | | | Disorders”). Preferred indications include |
| | | | | | autoimmune diseases (e.g., rheumatoid arthritis, |
| | | | | | systemic lupus erythematosis, multiple sclerosis |
| | | | | | and/or as described below), immunodeficiencies (e.g., |
| | | | | | as described below), organ and tissue transplant |
| | | | | | rejection. |
| | | | | | Additional preferred indications include |
| | | | | | inflammation and inflammatory disorders. |
| | | | | | Preferred indications include anemia, pancytopenia, |
| | | | | | leukopenia, thrombocytopenia, Hodgkin's disease, |
| | | | | | acute lymphocytic anemia (ALL), plasmacytomas, |
| | | | | | multiple myeloma, Burkitt's lymphoma, Non- |
| | | | | | Hodgkin's lymphoma, Kaposi's sarcoma arthritis, |
| | | | | | granulomatous disease, inflammatory bowel disease, |
| | | | | | Hepatitis (e.g. Hepatitis C), sepsis, neutropenia, |
| | | | | | neutrophilia, psoriasis, hemophilia, hypercoagulation, |
| | | | | | diabetes mellitus, endocarditis, meningitis, Lyme |
| | | | | | Disease, asthma and allergy. |
| 128 | HMFHE73 | 320 | Production of | IL-6 FMAT. IL-6 has strong effects on immune | A highly preferred embodiment of the invention |
| | | | IL-6 by | cells. For example, IL-6 participates in IL-4 | includes a method for stimulating IL-6 production. An |
| | | | endothelial | induced IgE production and increases IgA | alternative highly preferred embodiment of the |
| | | | cells (such as | production (IgA plays a role in mucosal | invention includes a method for inhibiting (e.g., |
| | | | Human | immunity). IL-6 induces cytotoxic T cells. | reducing) IL-6 production. |
| | | | Umbilical | Deregulated expression of IL-6 has been linked to | Highly preferred indications include |
| | | | Cord | autoimmune disease, plasmacytomas, myelomas, | immunological and inflammatory disorders (e.g., such |
| | | | Endothelial | and chronic hyperproliferative diseases. Assays | as allergy and asthma) and as described below under |
| | | | Cells). | for immunomodulatory and differentiation factor | “Immune Activity”, and “Blood-Related Disorders”. |
| | | | | proteins produced by a large variety of cells where | Highly preferred indications also include autoimmune |
| | | | | the expression level is strongly regulated by | disorders (e.g., rheumatoid arthritis, systemic lupus |
| | | | | cytokines, growth factors, and hormones are well | erythematosis, Crohn's disease, multiple sclerosis |
| | | | | known in the art and may be used or routinely | and/or as described below), neoplastic disorders (e.g., |
| | | | | modified to assess the ability of polypeptides of | organ cancers such as lung, liver, colon cancer, and/or |
| | | | | the invention (including antibodies and agonists or | as described below under “Hyperproliferative |
| | | | | antagonists of the invention) to mediate | Disorders”), and cardiovascular disorders (e.g. such as |
| | | | | immunomodulation and differentiation and | described below under “Cardiovascular Disorders”). |
| | | | | modulate T cell proliferation and function. | |
| | | | | Exemplary assays that test for immunomodulatory | |
| | | | | proteins evaluate the production of cytokines, | |
| | | | | such as IL-6, and the stimulation and upregulation | |
| | | | | of T cell proliferation and functional activities. | |
| | | | | Such assays that may be used or routinely | |
| | | | | modified to test immunomodulatory and | |
| | | | | differentiation activity of polypeptides of the | |
| | | | | invention (including antibodies and agonists or | |
| | | | | antagonists of the invention) include assays | |
| | | | | disclosed in Miraglia et al., J Biomolecular | |
| | | | | Screening 4: 193-204(1999); Rowland et al., | |
| | | | | “Lymphocytes: a practical approach” Chapter | |
| | | | | 6: 138-160 (2000); and Verhasselt et al., J | |
| | | | | Immunol 158: 2919-2925 (1997), the contents of | |
| | | | | each of which are herein incorporated by | |
| | | | | reference in its entirety. HUVECs are endothelial | |
| | | | | cells which line venous blood vessels, and are | |
| | | | | involved in functions that include, but are not | |
| | | | | limited to, angiogenesis, vascular permeability, | |
| | | | | vascular tone, and immune cell extravasation. | |
| | | | | Endothelial cells play a pivotal role in the | |
| | | | | initiation and perpetuation of inflammation and | |
| | | | | secretion of IL-6 may play an important role in | |
| | | | | recruitment and activation of immune cells such | |
| | | | | as neutrophils, macrophages, and lymphocytes. | |
| 130 | HMFHH91 | 322 | Production of | IL-2 FMAT. IL-2 is the principal T cell factor | A highly preferred embodiment of the invention |
| | | | IL-2 and | that allows T cell expansion and differentiation | includes a method for stimulating IL-2 production. An |
| | | | activation of | into effector cells. Assays for immunomodulatory | alternative highly preferred embodiment of the |
| | | | T cells; | proteins secreted by T cells that promote T cell | invention includes a method for inhibiting (e.g., |
| | | | particularly | and NK cell growth and differentiation are well | reducing) IL-2 production. |
| | | | wherein IL-2 | known in the art and may be used or routinely | A highly preferred embodiment of the invention |
| | | | secretion is | modified to assess the ability of polypeptides of | includes a method for stimulating T cell expansion. |
| | | | modulated by | the invention (including antibodies and agonists or | An alternative highly preferred embodiment of the |
| | | | contact with | antagonists of the invention) to mediate | invention includes a method for inhibiting T cell |
| | | | secreted | immunomodulation, promote immune cell growth | expansion. |
| | | | proteins in | and differentiation, and/or mediate humoral or | A highly preferred embodiment of the invention |
| | | | cell | cell-mediated immunity. Exemplary assays that | includes a method for stimulating T cell |
| | | | supernatents | test for immunomodulatory proteins evaluate the | differentiation. In a specific embodiment, this method |
| | | | and/or by | production of cytokines, such as IL-2, and the | stimulates T cell differentiation into effector cells. An |
| | | | contact with | activation of T cells. Such assays that may be | alternative highly preferred embodiment of the |
| | | | membrane | used or routinely modified to test | invention includes a method for inhibiting T cell |
| | | | bound | immunomodulatory activity of polypeptides of the | differentiation. In a specific embodiment, this method |
| | | | proteins | invention (including antibodies and agonists or | inhibits the differentiation of T cells into effector |
| | | | through in | antagonists of the invention) include the assays | cells. |
| | | | vitro cell-cell | disclosed in Miraglia et al., J Biomolecular | Highly preferred indications include neoplastic |
| | | | contact with | Screening 4: 193-204 (1999); Rowland et al., | diseases (e.g., melanoma, renal cell carcinoma, |
| | | | cells in co- | “Lymphocytes: a practical approach” Chapter | leukemia, lymphoma, and/or as described below |
| | | | culture, | 6: 138-160 (2000); Laduda et al., Immunology | under “Hyperproliferative Disorders”). Highly |
| | | | wherein the | 94(4): 496-502 (1998); and Powell et al., Immunol | preferred indications include neoplasms, such as, for |
| | | | co-cultured | Rev 165: 287-300 (1998), the contents of each of | example, melanoma (e.g., metastatic melanoma), |
| | | | cells express a | which are herein incorporated by reference in its | renal cell carcinoma (e.g., metastatic renal cell |
| | | | costimulatory | entirety. Highly preferred assays include those | carcinoma), leukemia, lymphoma (e.g., T cell |
| | | | transmembrane | wherein IL-2 production is tested for modulation | lymphoma), and prostate, breast, lung, colon, |
| | | | molecule. | by secreted proteins (in cell supernatents) or by | pancreatic, esophageal, stomach, brain, liver, ovarian, |
| | | | | cell-cell contact with membrane bound proteins | and urinary cancer. Other preferred indications |
| | | | | on cells in co-culture with T-cells, particularly | include benign dysproliferative disorders and pre- |
| | | | | wherein the co-cultured cells express a | neoplastic conditions, such as, for example, |
| | | | | transmembrane costimulatory molecule. Human | hyperplasia, metaplasia, and/or dysplasia. |
| | | | | T cells that may be used according to these assays | A highly preferred indication is infection (e.g., an |
| | | | | may be isolated using techniques disclosed herein | infectious disease as described below under |
| | | | | or otherwise known in the art. Human T cells are | “Infectious Disease”). A highly preferred indication is |
| | | | | primary human lymphocytes that mature in the | AIDS and HIV infection. |
| | | | | thymus and express a T cell receptor and CD3, | Additional highly preferred indications include |
| | | | | CD4, or CD8. These cells mediate humoral or | suppression of immune reactions to transplanted |
| | | | | cell-mediated immunity and may be preactivated | organs and/or tissues, uveitis, psoriasis, and tropical |
| | | | | to enhance responsiveness to immunomodulatory | spastic paraparesis. |
| | | | | factors. | Preferred indications include blood disorders |
| | | | | | (e.g., as described below under “Immune Activity”, |
| | | | | | “Blood-Related Disorders”, and/or “Cardiovascular |
| | | | | | Disorders”). Preferred indications include |
| | | | | | autoimmune diseases (e.g., rheumatoid arthritis, |
| | | | | | systemic lupus erythematosis, multiple sclerosis |
| | | | | | and/or as described below), immunodeficiencies (e.g., |
| | | | | | as described below), organ and tissue transplant |
| | | | | | rejection. |
| | | | | | Additional preferred indications include |
| | | | | | inflammation and inflammatory disorders. |
| | | | | | Preferred indications include anemia, pancytopenia, |
| | | | | | leukopenia, thrombocytopenia, Hodgkin's disease, |
| | | | | | acute lymphocytic anemia (ALL), plasmacytomas, |
| | | | | | multiple myeloma, Burkitt's lymphoma, Non- |
| | | | | | Hodgkin's lymphoma, Kaposi's sarcoma arthritis, |
| | | | | | granulomatous disease, inflammatory bowel disease, |
| | | | | | Hepatitis (e.g. Hepatitis C), sepsis, neutropenia, |
| | | | | | neutrophilia, psoriasis, hemophilia, hypercoagulation, |
| | | | | | diabetes mellitus, endocarditis, meningitis, Lyme |
| | | | | | Disease, asthma and allergy. |
| 131 | HMFIH13 | 323 | Production of | Vascular endothelial growth factor (VEGF) is | Highly preferred indications include neoplastic diseases |
| | | | Vascular | strong promoter of angiogenesis, the growth of | wherein angiogenesis promotes disease progression (e.g., |
| | | | Endothelial | new blood vessels from pre-existing vessels, | solid tumor cancers including but not limited to |
| | | | Growth | which can contribute to the development of | melanoma, prostate, breast, lung, pancreatic, esophageal, |
| | | | Factor | numerous types of tumors, and the formation of | stomach, brain, liver and urinary tract cancers, and/or as |
| | | | (VEGF), | metastases. In order to grow, tumors need new | described below under “Hyperproliferative Disorders”). |
| | | | particularly | blood vessels to form so that they can feed | Other preferred indications include benign |
| | | | in | themselves. Control of tumor angiogenesis is a | dysproliferative disorders and pre-neoplastic conditions, |
| | | | fibrosarcoma | prime therapeutic target for cancer therapy. | such as, for example, hyperplasia, metaplasia, and/or |
| | | | cell lines. | Assays to detect polypeptides of the invention | dysplasia. |
| | | | | (including antibodies and agonists or antagonists | |
| | | | | of the invention) that induce (or repress) VEGF | |
| | | | | production are well-known in the art and may be | |
| | | | | used or routinely modified to assess the ability of | |
| | | | | polypeptides of the invention (including | |
| | | | | antibodies and agonists or antagonists of the | |
| | | | | invention) to modulate VEGF production in vitro | |
| | | | | (e.g., human fibrosarcoma cell lines). | |
| 131 | HMFIH13 | 323 | Modulation | Caspase Apoptosis. Assays for caspase apoptosis | A highly preferred embodiment of the invention |
| | | | of caspase | are well known in the art and may be used or | includes a method for stimulating apoptosis in |
| | | | activity; | routinely modified to assess the ability of | transformed, cancerous, or tumorigenic cells. An |
| | | | particularly | polypeptides of the invention (including | alternative highly preferred embodiment of the |
| | | | in | antibodies and agonists or antagonists of the | invention includes a method for inhibiting (e.g., |
| | | | transformed | invention) to promote or prevent caspase protease- | decreasing) apoptosis of normal cells (e.g., such to |
| | | | cells, such as | mediated apoptosis. Assays monitoring induction | increase the half-life of cells such as immune cells |
| | | | colon cancer | of apoptosis in transformed cells (such as a colon | (e.g., B-cells) in conditions wherein there is an |
| | | | cell lines, | cancer cell lines) is particularly valuable for | immune cell population deficiency). |
| | | | more | identifying polypeptides useful for treating | Highly preferred indications include neoplastic |
| | | | particularly | neoplasia. These assays may preferentially be | diseases (e.g., as described below under |
| | | | wherein | performed in the presence of a chemotherapeutic | “Hyperproliferative Disorders”), and disorders of the |
| | | | modulation | agent (e.g., paclitaxel) to enhance assay | immune and hematopoietic system (e.g., such as |
| | | | of caspase | sensitivity. Exemplary assays for caspase | described below under “Immune Activity”, and |
| | | | activity is | apoptosis that may be used or routinely modified | “Blood-Related Disorders). Preferred indications |
| | | | performed in | to test caspase apoptosis activity of polypeptides | include autoimmune diseases (e.g., rheumatoid |
| | | | the presence | of the invention (including antibodies and agonists | arthritis, systemic lupus erythematosis, multiple |
| | | | of a | or antagonists of the invention) include the assays | sclerosis and/or as described below) and |
| | | | chemotherapeutic | disclosed in Lee et al., FEBS Lett 485(2-3): 122-126 | immunodeficiencies (e.g., as described below). |
| | | | agent | (2000); Nor et al., J Vasc Res 37(3): 209-218 | Additional preferred indications include inflammation |
| | | | (e.g., | (2000); and Karsan and Harlan, J Atheroscler | and inflammatory disorders (such as acute and chronic |
| | | | paclitaxel). | Thromb 3(2): 75-80 (1996); the contents of each | inflammatory diseases, e.g., inflammatory bowel |
| | | | | of which are herein incorporated by reference in | disease and Crohn's disease). |
| | | | | its entirety. Endothelial cells that may be used | |
| | | | | according to these assays are publicly available | |
| | | | | (e.g., through commercial sources). | |
| 131 | HMFIH13 | 323 | Modulation | CXCR4 is a G-protein-coupled, 7-transmembrane | Highly preferred indications include neoplastic |
| | | | of CXCR4 | domain receptor thought to play a critical role in | diseases (e.g., as described below under |
| | | | expression; | motility, homing and proliferation of cancer cells | “Hyperproliferative Disorders”), blood disorders (e.g., |
| | | | particularly | at specific metastatic sites. CXCR4 is also is a | as described below under “Immune Activity” and/or |
| | | | in | major co-receptor for T-cell-tropic HIV-1 strains, | “Blood-Related Disorders”), immune disorders (e.g., |
| | | | transformed | and thus an important mediator of cell | as described below under “Immune Activity”) and |
| | | | cells, e.g., | entry/infection by HIV. Exemplary assays that | infections (e.g., as described below under “Infectious |
| | | | such as colon | may be used or routinely modified to monitor | Disease”), particularly HIV infection. |
| | | | cancer cell | modulation of CXCR4 expression by polypeptides | Highly preferred indications also include |
| | | | lines. | of the invention (including antibodies and agonists | autoimmune diseases (e.g., rheumatoid arthritis, |
| | | | | or antagonists of the invention) are well known by | systemic lupus erythematosis, multiple sclerosis |
| | | | | those of ordinary skill in the art. In particular, | and/or as described below) and immunodeficiencies |
| | | | | assays that measure modulation of CXCR4 | (e.g., as described below). Additional highly |
| | | | | expression in transformed cells, such as colon | preferred indications include inflammation and |
| | | | | cancer cells, are useful for identification of | inflammatory disorders. Highly preferred |
| | | | | polypeptides (including antibodies and agonists or | indications also include cancers such as, kidney, |
| | | | | antagonists of the invention) which may be used | melanoma, prostate, breast, lung, colon, pancreatic, |
| | | | | in treatment of cancer and other neoplasias. | esophageal, stomach, brain, liver, urinary cancer, |
| | | | | Similarly, assays that measure modulation of | lymphoma and leukemias. Other preferred indications |
| | | | | CXCR4 expression in immune cells, such as T- | include benign dysproliferative disorders and pre- |
| | | | | cells, are useful for identification of polypeptides | neoplastic conditions, such as, for example, |
| | | | | (including antibodies and agonists or antagonists | hyperplasia, metaplasia, and/or dysplasia. Other |
| | | | | of the invention) which may be used in treatment | highly preferred indications include, pancytopenia, |
| | | | | of HIV/AIDS. | leukopenia, leukemias, Hodgkin's disease, acute |
| | | | | | lymphocytic anemia (ALL), arthritis, asthma, |
| | | | | | HIV/ALDS, granulomatous disease, inflammatory |
| | | | | | bowel disease, sepsis, psoriasis, immune reactions to |
| | | | | | transplanted organs and tissues, endocarditis, |
| | | | | | meningitis, Lyme Disease, and allergies. |
| 133 | HECKK69 | 325 | Modulation | The cAMP signaling pathway is critical for | Highly preferred indications include neoplastic |
| | | | of cyclic- | osteoblast differentiation and functions in bone | diseases (e.g., osteosarcoma and other bone cancers, |
| | | | AMP | development. | leukemia, lymphoma, and/or as described below |
| | | | (cAMP) | Assays to detect polypeptides of the invention | under “Hyperproliferative Disorders”). Highly |
| | | | production; | (including antibodies and agonists or antagonists | preferred indications include neoplasms and cancers, |
| | | | particularly | of the invention) that induce (or repress) cell | such as, for example, leukemia, lymphoma (e.g., T |
| | | | in osteoblast | viability are well-known in the art and may be | cell lymphoma, Burkitt's lymphoma, non-Hodgkins |
| | | | cells and | used or routinely modified to assess the ability of | lymphoma, Hodgkin's disease), melanoma, and |
| | | | transformed | polypeptides of the invention (including | prostate, breast, lung, pancreatic, esophageal, |
| | | | osteoblast- | antibodies and agonists or antagonists of the | stomach, brain, liver and urinary cancer. Other |
| | | | like cell lines | invention) to modulate cell viability of | preferred indications include benign dysproliferative |
| | | | (e.g., rat | transformed cell lines in vitro (e.g., rat | disorders and pre-neoplastic conditions, such as, for |
| | | | osteosarcoma | osteosarcoma cell lines). | example, hyperplasia, metaplasia, and/or dysplasia. |
| | | | cell lines.) | | |
| 143 | HEDDB56 | 335 | Production of | IL-2 FMAT. IL-2 is the principal T cell factor | A highly preferred embodiment of the invention |
| | | | IL-2 and | that allows T cell expansion and differentiation | includes a method for stimulating IL-2 production. An |
| | | | activation of | into effector cells. Assays for immunomodulatory | alternative highly preferred embodiment of the |
| | | | T cells; | proteins secreted by T cells that promote T cell | invention includes a method for inhibiting (e.g., |
| | | | particularly | and NK cell growth and differentiation are well | reducing) IL-2 production. |
| | | | wherein IL-2 | known in the art and may be used or routinely | A highly preferred embodiment of the invention |
| | | | secretion is | modified to assess the ability of polypeptides of | includes a method for stimulating T cell expansion. |
| | | | modulated by | the invention (including antibodies and agonists or | An alternative highly preferred embodiment of the |
| | | | contact with | antagonists of the invention) to mediate | invention includes a method for inhibiting T cell |
| | | | secreted | immunomodulation, promote immune cell growth | expansion. |
| | | | proteins in | and differentiation, and/or mediate humoral or | A highly preferred embodiment of the invention |
| | | | cell | cell-mediated immunity. Exemplary assays that | includes a method for stimulating T cell |
| | | | supernatents | test for immunomodulatory proteins evaluate the | differentiation. In a specific embodiment, this method |
| | | | and/or by | production of cytokines, such as IL-2, and the | stimulates T cell differentiation into effector cells. An |
| | | | contact with | activation of T cells. Such assays that may be | alternative highly preferred embodiment of the |
| | | | membrane | used or routinely modified to test | invention includes a method for inhibiting T cell |
| | | | bound | immunomodulatory activity of polypeptides of the | differentiation. In a specific embodiment, this method |
| | | | proteins | invention (including antibodies and agonists or | inhibits the differentiation of T cells into effector |
| | | | through in | antagonists of the invention) include the assays | cells. |
| | | | vitro cell-cell | disclosed in Miraglia et al., J Biomolecular | Highly preferred indications include neoplastic |
| | | | contact with | Screening 4: 193-204 (1999); Rowland et al., | diseases (e.g., melanoma, renal cell carcinoma, |
| | | | cells in co- | “Lymphocytes: a practical approach” Chapter | leukemia, lymphoma, and/or as described below |
| | | | culture, | 6: 138-160 (2000); Laduda et al., Immunology | under “Hyperproliferative Disorders”). Highly |
| | | | wherein the | 94(4): 496-502 (1998); and Powell et al., Immunol | preferred indications include neoplasms, such as, for |
| | | | co-cultured | Rev 165: 287-300 (1998), the contents of each of | example, melanoma (e.g., metastatic melanoma), |
| | | | cells express a | which are herein incorporated by reference in its | renal cell carcinoma (e.g., metastatic renal cell |
| | | | costimulatory | entirety. Highly preferred assays include those | carcinoma), leukemia, lymphoma (e.g., T cell |
| | | | transmembrane | wherein IL-2 production is tested for modulation | lymphoma), and prostate, breast, lung, colon, |
| | | | molecule. | by secreted proteins (in cell supernatents) or by | pancreatic, esophageal, stomach, brain, liver, ovarian, |
| | | | | cell-cell contact with membrane bound proteins | and urinary cancer. Other preferred indications |
| | | | | on cells in co-culture with T-cells, particularly | include benign dysproliferative disorders and pre- |
| | | | | wherein the co-cultured cells express a | neoplastic conditions, such as, for example, |
| | | | | transmembrane costimulatory molecule. Human | hyperplasia, metaplasia, and/or dysplasia. |
| | | | | T cells that may be used according to these assays | A highly preferred indication is infection (e.g., an |
| | | | | may be isolated using techniques disclosed herein | infectious disease as described below under |
| | | | | or otherwise known in the art. Human T cells are | “Infectious Disease”). A highly preferred indication is |
| | | | | primary human lymphocytes that mature in the | AIDS and HIV infection. |
| | | | | thymus and express a T cell receptor and CD3, | Additional highly preferred indications include |
| | | | | CD4, or CD8. These cells mediate humoral or | suppression of immune reactions to transplanted |
| | | | | cell-mediated immunity and may be preactivated | organs and/or tissues, uveitis, psoriasis, and tropical |
| | | | | to enhance responsiveness to immunomodulatory | spastic paraparesis. |
| | | | | factors. | Preferred indications include blood disorders |
| | | | | | (e.g., as described below under “Immune Activity”, |
| | | | | | “Blood-Related Disorders”, and/or “Cardiovascular |
| | | | | | Disorders”). Preferred indications include |
| | | | | | autoimmune diseases (e.g., rheumatoid arthritis, |
| | | | | | systemic lupus erythematosis, multiple sclerosis |
| | | | | | and/or as described below), immunodeficiencies (e.g., |
| | | | | | as described below), organ and tissue transplant |
| | | | | | rejection. |
| | | | | | Additional preferred indications include |
| | | | | | inflammation and inflammatory disorders. |
| | | | | | Preferred indications include anemia, pancytopenia, |
| | | | | | leukopenia, thrombocytopenia, Hodgkin's disease, |
| | | | | | acute lymphocytic anemia (ALL), plasmacytomas, |
| | | | | | multiple myeloma, Burkitt's lymphoma, Non- |
| | | | | | Hodgkin's lymphoma, Kaposi's sarcoma arthritis, |
| | | | | | granulomatous disease, inflammatory bowel disease, |
| | | | | | Hepatitis (e.g. Hepatitis C), sepsis, neutropenia, |
| | | | | | neutrophilia, psoriasis, hemophilia, hypercoagulation, |
| | | | | | diabetes mellitus, endocarditis, meningitis, Lyme |
| | | | | | Disease, asthma and allergy. |
| 150 | HECKQ42 | 342 | Modulation | The cAMP signaling pathway is critical for | Highly preferred indications include neoplastic |
| | | | of cyclic- | osteoblast differentiation and functions in bone | diseases (e.g., osteosarcoma and other bone cancers, |
| | | | AMP | development. | leukemia, lymphoma, and/or as described below |
| | | | (cAMP) | Assays to detect polypeptides of the invention | under “Hyperproliferative Disorders”). Highly |
| | | | production; | (including antibodies and agonists or antagonists | preferred indications include neoplasms and cancers, |
| | | | particularly | of the invention) that induce (or repress) cell | such as, for example, leukemia, lymphoma (e.g., T |
| | | | in osteoblast | viability are well-known in the art and may be | cell lymphoma, Burkitt's lymphoma, non-Hodgkins |
| | | | cells and | used or routinely modified to assess the ability of | lymphoma, Hodgkin's disease), melanoma, and |
| | | | transformed | polypeptides of the invention (including | prostate, breast, lung, pancreatic, esophageal, |
| | | | osteoblast- | antibodies and agonists or antagonists of the | stomach, brain, liver and urinary cancer. Other |
| | | | like cell lines | invention) to modulate cell viability of | preferred indications include benign dysproliferative |
| | | | (e.g., rat | transformed cell lines in vitro (e.g., rat | disorders and pre-neoplastic conditions, such as, for |
| | | | osteosarcoma | osteosarcoma cell lines). | example, hyperplasia, metaplasia, and/or dysplasia. |
| | | | cell lines). | | |
| 157 | HCBOG68 | 349 | Activation of | Assays for the activation of transcription through | A highly preferred indication is obesity and/or |
| | | | transcription | the cAMP response element are well-known in the | complications associated with obesity. Additional highly |
| | | | through | art and may be used or routinely modified to | preferred indications include weight loss or alternatively, |
| | | | cAMP | assess the ability of polypeptides of the invention | weight gain. An additional highly preferred indication is |
| | | | response | (including antibodies and agonists or antagonists | diabetes mellitus. An additional highly preferred |
| | | | element | of the invention) to increase cAMP, regulate | indication is a complication associated with diabetes |
| | | | (CRE) in pre- | CREB transcription factors, and modulate | (e.g., diabetic retinopathy, diabetic nephropathy, kidney |
| | | | adipocytes. | expression of genes involved in a wide variety of | disease (e.g., renal failure, nephropathy and/or other |
| | | | | cell functions. For example, a 3T3-L1/CRE | diseases and disorders as described in the “Renal |
| | | | | reporter assay may be used to identify factors that | Disorders” section below), diabetic neuropathy, nerve |
| | | | | activate the cAMP signaling pathway. CREB | disease and nerve damage (e.g., due to diabetic |
| | | | | plays a major role in adipogenesis, and is involved | neuropathy), blood vessel blockage, heart disease, stroke, |
| | | | | in differentiation into adipocytes. CRE contains | impotence (e.g., due to diabetic neuropathy or blood |
| | | | | the binding sequence for the transcription factor | vessel blockage), seizures, mental confusion, drowsiness, |
| | | | | CREB (CRE binding protein). Exemplary assays | nonketotic hyperglycemic-hyperosmolar coma, |
| | | | | for transcription through the cAMP response | cardiovascular disease (e.g., heart disease, |
| | | | | element that may be used or routinely modified to | atherosclerosis, microvascular disease, hypertension, |
| | | | | test cAMP-response element activity of | stroke, and other diseases and disorders as described in |
| | | | | polypeptides of the invention (including | the “Cardiovascular Disorders” section below), |
| | | | | antibodies and agonists or antagonists of the | dyslipidemia, endocrine disorders (as described in the |
| | | | | invention) include assays disclosed in Berger et | “Endocrine Disorders” section below), neuropathy, |
| | | | | al., Gene 66: 1-10 (1998); Cullen and Malm, | vision impairment (e.g., diabetic retinopathy and |
| | | | | Methods in Enzymol 216: 362-368 (1992); | blindness), ulcers and impaired wound healing, and |
| | | | | Henthorn et al., Proc Natl Acad Sci USA | infection (e.g., infectious diseases and disorders as |
| | | | | 85: 6342-6346 (1988); Reusch et al., Mol Cell | described in the “Infectious Diseases” section below, |
| | | | | Biol 20(3): 1008-1020 (2000); and Klemm et al., J | especially of the urinary tract and skin), carpal tunnel |
| | | | | Biol Chem 273: 917-923 (1998), the contents of | syndrome and Dupuytren's contracture). Additional |
| | | | | each of which are herein incorporated by | highly preferred indications are complications associated |
| | | | | reference in its entirety. Pre-adipocytes that may | with insulin resistance. |
| | | | | be used according to these assays are publicly | |
| | | | | available (e.g., through the ATCC) and/or may be | |
| | | | | routinely generated. Exemplary mouse adipocyte | |
| | | | | cells that may be used according to these assays | |
| | | | | include 3T3-L1 cells. 3T3-L1 is an adherent | |
| | | | | mouse preadipocyte cell line that is a continuous | |
| | | | | substrain of 3T3 fibroblast cells developed | |
| | | | | through clonal isolation and undergo a pre- | |
| | | | | adipocyte to adipose-like conversion under | |
| | | | | appropriate differentiation conditions known in | |
| | | | | the art. | |

Description of Table 2

[1056] Table 2 summarizes homology and features of some of the polypeptides of the invention by providing the results of comparisons to protein and protein family databases. The first column provides a unique clone identifier, “Clone ID NO:”, corresponding to a cDNA clone disclosed in Table 1A or 1B. The second column provides the unique contig identifier, “Contig ID:” corresponding to contigs in Table 1B and allowing for correlation with the information in Table 1B. The third column provides the sequence identifier, “SEQ ID NO:X”, for the contig polynucleotide sequence. The fourth column provides the analysis method by which the homology/identity disclosed in the Table was determined. Comparisons were made between polypeptides encoded by the polynucleotides of the invention and either a non-redundant protein database (herein referred to as “NR”), or a database of protein families (herein referred to as “PFAM”) as further described below. The fifth column provides a description of the PFAM/NR hit having a significant match to a polypeptide of the invention. Column six provides the accession number of the PFAM/NR hit disclosed in the fifth column. Column seven, “Score/Percent Identity”, provides a quality score or the percent identity, of the hit disclosed in columns five and six. Comparisons were made between polypeptides encoded by polynucleotides of the invention and a non-redundant protein database (herein referred to as “NR”), or a database of protein families (herein referred to as “PFAM”), as described below.

[1057] The NR database, which comprises the NBRF PIR database, the NCBI GenPept database, and the SIB SwissProt and TrEMBL databases, was made non-redundant using the computer program nrdb2 (Warren Gish, Washington University in Saint Louis). Each of the polynucleotides shown in Table 1B, column 3 (e.g., SEQ ID NO:X or the ‘Query’ sequence) was used to search against the NR database. The computer program BLASTX was used to compare a 6-frame translation of the Query sequence to the NR database (for information about the BLASTX algorithm see Altshul et al., J. Mol. Biol. 215:403-410 (1990), and Gish and States, Nat. Genet. 3:266-272 (1993)). A description of the sequence that is most similar to the Query sequence (the highest scoring ‘Subject’) is shown in column five of Table 2 and the database accession number for that sequence is provided in column six. The highest scoring ‘Subject’ is reported in Table 2 if (a) the estimated probability that the match occurred by chance alone is less than 1.0e-07, and (b) the match was not to a known repetitive element. BLASTX returns alignments of short polypeptide segments of the Query and Subject sequences which share a high degree of similarity; these segments are known as High-Scoring Segment Pairs or HSPs. Table 2 reports the degree of similarity between the Query and the Subject for each HSP as a percent identity in Column 7. The percent identity is determined by dividing the number of exact matches between the two aligned sequences in the HSP, dividing by the number of Query amino acids in the HSP and multiplying by 100. The polynucleotides of SEQ ID NO:X which encode the polypeptide sequence that generates an HSP are delineated by columns 8 and 9 of Table 2.

[1058] The PFAM database, PFAM version 2.1, (Sonnhammer, Nucl. Acids Res., 26:320-322, 1998)) consists of a series of multiple sequence alignments; one alignment for each protein family. Each multiple sequence alignment is converted into a probability model called a Hidden Markov Model, or HMM, that represents the position-specific variation among the sequences that make up the multiple sequence alignment (see, e.g., Durbin, et al., Biological sequence analysis: probabilistic models of proteins and nucleic acids, Cambridge University Press, 1998 for the theory of HMMs). The program HMMER version 1.8 (Sean Eddy, Washington University in Saint Louis) was used to compare the predicted protein sequence for each Query sequence (SEQ ID NO:Y in Table 1B) to each of the HMMs derived from PFAM version 2.1. A HMM derived from PFAM version 2.1 was said to be a significant match to a polypeptide of the invention if the score returned by HMMER 1.8 was greater than 0.8 times the HMMER 1.8 score obtained with the most distantly related known member of that protein family. The description of the PFAM family, which shares a significant match with a polypeptide of the invention, is listed in column 5 of Table 2, and the database accession number of the PFAM hit is provided in column 6. Column 7 provides the score returned by HMMER version 1.8 for the alignment. Columns 8 and 9 delineate the polynucleotides of SEQ ID NO:X which encode the polypeptide sequence which show a significant match to a PFAM protein family.

[1059] Columns 8 and 9, “NT From” and “NT To” respectively, delineate the polynucleotides in “SEQ ID NO:X” that encode a polypeptide having a significant match to the PFAM/NR database as disclosed in the fifth and sixth columns. In specific embodiments polypeptides of the invention comprise, or alternatively consist of, an amino acid sequence encoded by a polynucleotide in SEQ ID NO:X as delineated in columns 8 and 9, or fragments or variants thereof. Also provided are polynucleotides encoding such proteins, and the complementary strand thereto.

[1060] The nucleotide sequence SEQ ID NO:X and the translated SEQ ID NO:Y are sufficiently accurate and otherwise suitable for a variety of uses well known in the art and described further below. For instance, the nucleotide sequences of SEQ ID NO:X are useful for designing nucleic acid hybridization probes that will detect nucleic acid sequences contained in SEQ ID NO:X or the cDNA contained in ATCC Deposit No:Z. These probes will also hybridize to nucleic acid molecules in biological samples, thereby enabling immediate applications in chromosome mapping, linkage analysis, tissue identification and/or typing, and a variety of forensic and diagnostic methods of the invention. Similarly, polypeptides identified from SEQ ID NO:Y may be used to generate antibodies which bind specifically to these polypeptides, or fragments thereof, and/or to the polypeptides encoded by the cDNA clones identified in, for example, Table 1A and/or 1B.

[1061] Nevertheless, DNA sequences generated by sequencing reactions can contain sequencing errors. The errors exist as misidentified nucleotides, or as insertions or deletions of nucleotides in the generated DNA sequence. The erroneously inserted or deleted nucleotides cause frame shifts in the reading frames of the predicted amino acid sequence. In these cases, the predicted amino acid sequence diverges from the actual amino acid sequence, even though the generated DNA sequence may be greater than 99.9% identical to the actual DNA sequence (for example, one base insertion or deletion in an open reading frame of over 1000 bases).

[1062] Accordingly, for those applications requiring precision in the nucleotide sequence or the amino acid sequence, the present invention provides not only the generated nucleotide sequence identified as SEQ ID NO:X, and a predicted translated amino acid sequence identified as SEQ ID NO:Y, but also a sample of plasmid DNA containing cDNA ATCC Deposit No:Z (e.g., as set forth in columns 2 and 3 of Table 1A and/or as set forth, for example, in Table 1B). The nucleotide sequence of each deposited clone can readily be determined by sequencing the deposited clone in accordance with known methods. Further, techniques known in the art can be used to verify the nucleotide sequences of SEQ ID NO:X.

[1063] The predicted amino acid sequence can then be verified from such deposits. Moreover, the amino acid sequence of the protein encoded by a particular clone can also be directly determined by peptide sequencing or by expressing the protein in a suitable host cell containing the deposited human cDNA, collecting the protein, and determining its sequence.

TABLE 2

| | | SEQ | | | | Score/ | | |
|---|---|---|---|---|---|---|---|---|
| cDNA | Contig | ID | Analysis | | PFam/NR Accession | Percent | | |
| Clone ID | ID: | NO: X | Method | PFam/NR Description | Number | Identity | NT From | NT To |
| HERHC26 | 1337815 | 11 | WUblastx.64 | alpha-2-antiplasmin | pir\|A31402\|ITHUA2 | 96% | 123 | 1550 |
| | | | | precursor [validated] - | | | | |
| | | | | human | | | | |
| HERHC24 | 1337814 | 12 | WUblastx.64 | alpha-2-antiplasmin | pir\|A31402\|ITHUA2 | 88% | 68 | 523 |
| | | | | precursor [validated] - | | | | |
| | | | | human | | | | |
| HEELM24 | 1338306 | 13 | WUblastx.64 | (Q8WWI9) TSG-6 protein | Q8WWI9 | 99% | 56 | 541 |
| | | | | precursor. | | | | |
| HEFEZ39 | 1336526 | 14 | WUblastx.64 | (Q99805) transmembrane | T9S2_HUMAN | 100% | 222 | 530 |
| | | | | 9 superfamily protein | | | | |
| | | | | member 2 precursor | | | | |
| HEFFH42 | 1335777 | 15 | WUblastx.64 | (AAH22399) | AAH22399 | 94% | 132 | 845 |
| | | | | Hypothetical 45.2 kDa | | | | |
| | | | | protein (Fragment) | | | | |
| HLCOO14 | 1335382 | 16 | WUblastx.64 | amphiregulin precursor | pir\|A34702\|A34702 | 67% | 351 | 1052 |
| | | | | [validated] - human | | | | |
| HLEFV28 | 1335435 | 17 | WUblastx.64 | pulmonary surfactant | pir\|I51921\|I51921 | 100% | 99 | 221 |
| | | | | associated protein A1 - | | 100% | 393 | 497 |
| | | | | human | | 61% | 180 | 218 |
| | | | | | | 53% | 180 | 218 |
| | | | | | | 53% | 180 | 218 |
| | | | | | | 44% | 165 | 218 |
| HLEGA38 | 1335424 | 18 | WUblastx.64 | pulmonary surfactant | pir\|A24622\|LNHUPS | 67% | 287 | 520 |
| | | | | protein A precursor | | 100% | 74 | 190 |
| | | | | (genomic clone) - 1 | | | | |
| HLEGA38 | 1337616 | 168 | WUblastx.64 | (p06908) pulmonary | PSPA_CANFA | 74% | 109 | 378 |
| | | | | surfactant-associated | | 48% | 187 | 300 |
| | | | | protein a precursor | | 55% | 384 | 749 |
| | | | | | | 27% | 541 | 762 |
| | | | | | | 52% | 190 | 297 |
| HPCBJ78 | 1337797 | 19 | WUblastx.64 | pancreatic elastase II (EC | pir\|B26823\|B26823 | 97% | 24 | 830 |
| | | | | 3.4.21.71) A precursor - | | | | |
| | | | | human | | | | |
| HEDBJ87 | 1336693 | 20 | WUblastx.64 | superoxide dismutase (EC | pir\|A28301\|DSHUEC | 96% | 116 | 493 |
| | | | | 1.15.1.1) (Cu—Zn) | | | | |
| | | | | precursor, extracellular - | | | | |
| | | | | human | | | | |
| HEELE81 | 1335729 | 21 | WUblastx.64 | (Q8WVP4) Similar to | Q8WVP4 | 98% | 47 | 1858 |
| | | | | quiescin Q6. | | | | |
| HEFEW51 | 1335745 | 22 | WUblastx.64 | apolipoprotein D | pir\|A26958\|LPHUD | 89% | 86 | 652 |
| | | | | precursor [validated] - | | | | |
| | | | | human | | | | |
| HLEFO22 | 1337615 | 23 | WUblastx.64 | pulmonary surfactant | pir\|A24622\|LNHUPS | 100% | 140 | 256 |
| | | | | protein A precursor | | 61% | 353 | 562 |
| | | | | (genomic clone) - 1 | | | | |
| HEELG41 | 1335998 | 24 | WUblastx.64 | (Q9W2Y3) CG2974 | Q9W2Y3 | 69% | 212 | 532 |
| | | | | protein. | | | | |
| HNEMP21 | 1344654 | 25 | WUblastx.64 | complement | pir\|S14351\|C1HUQC | 100% | 455 | 853 |
| | | | | subcomponent C1q chain | | 28% | 39 | 260 |
| | | | | C precursor - human | | 53% | 119 | 358 |
| | | | | | | 52% | 209 | 265 |
| | | | | | | 34% | 219 | 341 |
| | | | | | | 30% | 129 | 422 |
| | | | | | | 33% | 213 | 410 |
| HNEMO56 | 1344633 | 27 | WUblastx.64 | (Q96NZ9) Proline-rich | Q96NZ9 | 92% | 233 | 685 |
| | | | | acidic protein. | | | | |
| HLCOY89 | 1335885 | 29 | WUblastx.64 | (Q8WVH8) Hypothetical | Q8WVH8 | 70% | 103 | 855 |
| | | | | 38.9 kDa protein. | | | | |
| HLCPI67 | 1335342 | 30 | WUblastx.64 | (Q96DA6) Similar to | Q96DA6 | 100% | 172 | 519 |
| | | | | RIKEN cDNA | | | | |
| | | | | 1810055D05 gene. | | | | |
| HCPRA19 | 1343653 | 31 | WUblastx.64 | (Q99805) transmembrane | T9S2_HUMAN | 64% | 1990 | 2031 |
| | | | | 9 superfamily protein | | 97% | 293 | 2014 |
| | | | | member 2 precursor | | | | |
| HEFEN82 | 1335771 | 32 | WUblastx.64 | (AAH07913) Similar to | AAH07913 | 81% | 167 | 1306 |
| | | | | RIKEN cDNA | | | | |
| | | | | 2300004C15 gene. | | | | |
| HEELL43 | 1337306 | 33 | WUblastx.64 | (O60235) airway trypsin- | O60235 | 32% | 135 | 533 |
| | | | | like protease. | | | | |
| HEELL43 | 1343401 | 169 | WUblastx.64 | bone marrow stromal cell | pir\|A56836\|A56836 | 85% | 107 | 553 |
| | | | | surface protein BST-2 - | | | | |
| | | | | human | | | | |
| HLEFG68 | 1335798 | 34 | WUblastx.64 | pulmonary surfactant | pir\|B25720\|LNHUP1 | 89% | 418 | 621 |
| | | | | protein A precursor (clone | | 97% | 124 | 240 |
| | | | | 1A) - human | | 53% | 630 | 764 |
| | | | | | | 60% | 205 | 234 |
| | | | | | | 70% | 205 | 234 |
| | | | | | | 60% | 205 | 234 |
| HERHL91 | 1339169 | 35 | WUblastx.64 | (Q9UJN8) DJ153G14.2 | Q9UJN8 | 79% | 248 | 493 |
| | | | | putative novel protein | | | | |
| | | | | similar to worm f55a11.1 | | | | |
| HERHL91 | 1339170 | 170 | WUblastx.64 | (Q9UJN8) DJ153G14.2 | Q9UJN8 | 90% | 367 | 630 |
| | | | | putative novel protein | | | | |
| | | | | similar to worm F55A11.1 | | | | |
| HERHL91 | 1316906 | 171 | WUblastx.64 | (BAB55214) CDNA | BAB55214 | 70% | 546 | 575 |
| | | | | FLJ14681 fis, clone | | 97% | 320 | 550 |
| | | | | NT2RP2004270, w | | 84% | 580 | 834 |
| HPCCR42 | 1337796 | 37 | WUblastx.64 | (Q96AK2) Dipeptidase 1 | Q96AK2 | 100% | 169 | 996 |
| | | | | (renal). | | | | |
| HECHI83 | 1337091 | 38 | WUblastx.64 | (Q96DJ5) UDP-N-acetyl- | Q96DJ5 | 56% | 333 | 539 |
| | | | | alpha-D- | | | | |
| | | | | galactosamine:polypeptide | | | | |
| | | | | N-acetylgalac | | | | |
| HEFEL28 | 1342969 | 39 | WUblastx.64 | (BAB85033) CDNA | BAB85033 | 100% | 210 | 635 |
| | | | | FLJ23684 fis, clone | | | | |
| | | | | HEP09821. | | | | |
| HLEFK80 | 1335373 | 41 | WUblastx.64 | pulmonary surfactant | pir\|B25720\|LNHUP1 | 100% | 95 | 217 |
| | | | | protein A precursor (clone | | | | |
| | | | | 1A) - human | | | | |
| HLEFR48 | 1338572 | 43 | WUblastx.64 | (Q9ESF4) LAG protein. | Q9ESF4 | 69% | 752 | 889 |
| | | | | | | 97% | 99 | 230 |
| | | | | | | 95% | 397 | 651 |
| HLEFF44 | 1345360 | 45 | WUblastx.64 | (Q96GD8) Ladinin 1. | Q96GD8 | 96% | 205 | 1650 |
| HLEFV31 | 1335799 | 47 | WUblastx.64 | pulmonary surfactant | pir\|A24622\|LNHUPS | 100% | 125 | 241 |
| | | | | protein A precursor | | 59% | 338 | 499 |
| | | | | (genomic clone) - 1 | | | | |
| HLCOW38 | 1339959 | 48 | WUblastx.64 | (O15427) | MOT4_HUMAN | 65% | 14 | 538 |
| | | | | monocarboxylate | | | | |
| | | | | transporter 4 (MCT 4) | | | | |
| | | | | (MCT 3). | | | | |
| HEFEP03 | 1344605 | 49 | WUblastx.64 | (Q15041) ARL-6 | AR61_HUMAN | 92% | 95 | 667 |
| | | | | interacting protein-1 (AIP- | | | | |
| | | | | 1). | | | | |
| HEFFD82 | 1344613 | 50 | WUblastx.64 | apolipoprotein D | pir\|A26958\|LPHUD | 89% | 247 | 813 |
| | | | | precursor [validated] - | | | | |
| | | | | human | | | | |
| HECHH44 | 1353379 | 51 | WUblastx.64 | (AAH07038) Lumican. | AAH07038 | 100% | 60 | 842 |
| | | | | | | 26% | 234 | 812 |
| HLEGA47 | 1335348 | 52 | WUblastx.64 | (Q92545) RW1 protein | RW1_HUMAN | 100% | 13 | 285 |
| | | | | (fragment). | | | | |
| HEDBJ79 | 1344635 | 53 | WUblastx.64 | (Q96GD8) Ladinin 1. | Q96GD8 | 96% | 205 | 1650 |
| HEEML62 | 1344608 | 54 | WUblastx.64 | (Q60386) ZN-alpha2- | O60386 | 100% | 832 | 1029 |
| | | | | glycoprotein. | | 93% | 27 | 866 |
| HEELB16 | 1344619 | 55 | WUblastx.64 | (Q96FI8) Unknown | Q96FI8 | 90% | 2 | 1636 |
| | | | | (protein for MGC: 9160). | | | | |
| HABDM96 | 1337770 | 57 | WUblastx.64 | (Q99805) transmembrane | T9S2_HUMAN | 78% | 3 | 332 |
| | | | | 9 superfamily protein | | | | |
| | | | | member 2 precursor | | | | |
| HPCBB59 | 1353385 | 58 | WUblastx.64 | pancreatic elastase II (EC | pir\|B26823\|B26823 | 100% | 5 | 385 |
| | | | | 3.4.21.71) A precursor - | | | | |
| | | | | human | | | | |
| HERHD36 | 1322788 | 59 | WUblastx.64 | (Q99650) oncostatin-M | Q99650 | 60% | 597 | 553 |
| | | | | specific receptor beta | | 58% | 626 | 555 |
| | | | | subunit. | | 98% | 583 | 29 |
| HIGAT21 | 1341980 | 60 | WUblastx.64 | (O60386) ZN-alpha2- | O60386 | 100% | 343 | 215 |
| | | | | glycoprotein. | | 95% | 872 | 390 |
| HIGAT21 | 1341981 | 172 | WUblastx.64 | zinc-alpha-2-glycoprotein | pir\|A54175\|A54175 | 99% | 16 | 525 |
| | | | | precursor - human | | | | |
| HIGBG18 | 1337744 | 61 | WUblastx.64 | (Q9V6L4) CG12251 | Q9V6L4 | 33% | 703 | 864 |
| | | | | protein. | | 22% | 80 | 688 |
| HIGBQ67 | 1344625 | 62 | WUblastx.64 | (Q9W2Y3) CG2974 | Q9W2Y3 | 61% | 239 | 922 |
| | | | | protein. | | | | |
| HPNCW15 | 1337821 | 63 | WUblastx.64 | colipase precursor | pir\|A42568\|XLHU | 100% | 121 | 249 |
| | | | | [validated] - human | | 46% | 37 | 120 |
| HIGAT76 | 1337712 | 64 | WUblastx.64 | colipase precursor | pir\|A42568\|XLHU | 86% | 21 | 356 |
| | | | | [validated] - human | | | | |
| HPNCC51 | 1343401 | 65 | WUblastx.64 | bone marrow stromal cell | pir\|A56836\|A56836 | 85% | 107 | 553 |
| | | | | surface protein BST-2 - | | | | |
| | | | | human | | | | |
| HECHQ69 | 1365244 | 67 | WUblastx.64 | pHL E1F1 - human | pir\|I54810\|I54810 | 100% | 304 | 197 |
| | | | | | | 62% | 550 | 389 |
| HECJN68 | 1365231 | 68 | WUblastx.64 | (Q9D7Z4) | Q9D7Z4 | 80% | 141 | 902 |
| | | | | 2210008A03RIK protein. | | | | |
| HEFJO40 | 1362923 | 69 | WUblastx.64 | placental protein 11 | pir\|A34614\|A34614 | 99% | 151 | 1140 |
| | | | | precursor - human | | | | |
| HEGLK47 | 1367720 | 70 | WUblastx.64 | (Q96QZ4) Leucine-rich | Q96QZ4 | 97% | 24 | 1061 |
| | | | | alpha-2-glycoprotein | | | | |
| | | | | precursor. | | | | |
| HEDDJ18 | 1362820 | 71 | WUblastx.64 | (P30990) | NEUT_HUMAN | 86% | 91 | 600 |
| | | | | neurotensin/neuromedin N | | | | |
| | | | | precursor (NT/NMN). | | | | |
| HEGLA38 | 1367491 | 72 | WUblastx.64 | (Q8VCP9) RIKEN cDNA | Q8VCP9 | 69% | 17 | 889 |
| | | | | 1200003C23 gene. | | | | |
| HMFHI61 | 1374294 | 74 | WUblastx.64 | (AAH07038) Lumican. | AAH07038 | 94% | 59 | 1072 |
| HECJZ49 | 1374268 | 76 | WUblastx.64 | placental protein 11 | pir\|A34614\|A34614 | 87% | 983 | 1030 |
| | | | | precursor - human | | 91% | 76 | 999 |
| HPCCR42 | 1337796 | 77 | WUblastx.64 | (Q96AK2) Dipeptidase 1 | Q96AK2 | 100% | 169 | 996 |
| | | | | (renal). | | | | |
| HECHP58 | 1362970 | 78 | WUblastx.64 | (Q96QR1) Uteroglobin- | UGR2_HUMAN | 41% | 117 | 359 |
| | | | | related protein 2 precursor | | | | |
| | | | | (Cytokine | | | | |
| HEFGF49 | 1366233 | 79 | WUblastx.64 | (Q96QV2) Porimin. | Q96QV2 | 74% | 320 | 820 |
| HEFJI37 | 1365175 | 80 | WUblastx.64 | superoxide dismutase (EC | pir\|A28301\|DSHUEC | 100% | 243 | 851 |
| | | | | 1.15.1.1) (Cu—Zn) | | | | |
| | | | | precursor, extracellular - | | | | |
| | | | | human | | | | |
| HEDCP16 | 1365248 | 81 | WUblastx.64 | (AAH24561) Similar to | AAH24561 | 70% | 114 | 299 |
| | | | | hypothetical gene | | | | |
| | | | | LOC125944. | | | | |
| HECJR25 | 1365243 | 82 | WUblastx.64 | pHL E1F1 - human | pir\|I54810\|I54810 | 100% | 644 | 751 |
| | | | | | | 62% | 398 | 559 |
| HEFID84 | 1365275 | 87 | WUblastx.64 | bone marrow stromal cell | pir\|A56836\|A56836 | 85% | 143 | 589 |
| | | | | surface protein BST-2 - | | | | |
| | | | | human | | | | |
| HEHXR32 | 1349325 | 88 | WUblastx.64 | (Q14728) tetracycline | Q14728 | 76% | 120 | 470 |
| | | | | transporter-like protein | | 65% | 772 | 1806 |
| | | | | mRNA. | | | | |
| HEDCZ72 | 1362945 | 90 | WUblastx.64 | (Q9UDU8) | Q9UDU8 | 74% | 722 | 1252 |
| | | | | WUGSC:H_DJ1087M19.1 | | | | |
| | | | | protein. | | | | |
| HECKS63 | 1374270 | 93 | WUblastx.64 | apolipoprotein D | pir\|A26958\|LPHUD | 89% | 74 | 640 |
| | | | | precursor [validated] - | | | | |
| | | | | human | | | | |
| HEDEQ16 | 1374273 | 94 | WUblastx.64 | bone marrow stromal cell | pir\|A56836\|A56836 | 85% | 21 | 467 |
| | | | | surface protein BST-2 - | | | | |
| | | | | human | | | | |
| HEENI83 | 1374276 | 95 | WUblastx.64 | bone marrow stromal cell | pir\|A56836\|A56836 | 85% | 51 | 497 |
| | | | | surface protein BST-2 - | | | | |
| | | | | human | | | | |
| HMFHN24 | 1362928 | 96 | WUblastx.64 | proteoglycan link protein | pir\|S14914\|LKHU | 100% | 250 | 1311 |
| | | | | precursor [validated] - | | | | |
| | | | | human | | | | |
| HEENV67 | 1374278 | 98 | WUblastx.64 | complement | pir\|S14351\|C1HUQC | 99% | 474 | 872 |
| | | | | subcomponent C1q chain | | 27% | 4 | 279 |
| | | | | C precursor - human | | 53% | 138 | 377 |
| | | | | | | 52% | 228 | 284 |
| | | | | | | 34% | 238 | 360 |
| | | | | | | 30% | 148 | 441 |
| | | | | | | 33% | 232 | 429 |
| HECIB71 | 1374267 | 99 | WUblastx.64 | (AAH08429) Similar to | AAH08429 | 99% | 80 | 1228 |
| | | | | DNA segment, Chr 2, | | | | |
| | | | | Massachusset | | | | |
| HEHNE29 | 1374288 | 100 | WUblastx.64 | placental protein 11 | pir\|A34614\|A34614 | 93% | 250 | 1056 |
| | | | | precursor - human | | 34% | 139 | 339 |
| | | | | | | 100% | 73 | 126 |
| HEHXS16 | 1374290 | 101 | WUblastx.64 | bone marrow stromal cell | pir\|A56836\|A56836 | 100% | 547 | 576 |
| | | | | surface protein BST-2 - | | 75% | 36 | 557 |
| | | | | human | | | | |
| HEDDB56 | 1365263 | 102 | WUblastx.64 | (AAH24561) Similar to | AAH24561 | 70% | 114 | 299 |
| | | | | hypothetical gene | | | | |
| | | | | LOC125944. | | | | |
| HMFHT07 | 1374297 | 104 | WUblastx.64 | (Q99805) transmembrane | T9S2_HUMAN | 87% | 12 | 593 |
| | | | | 9 superfamily protein | | | | |
| | | | | member 2 precursor | | | | |
| HNEMX81 | 1365284 | 105 | WUblastx.64 | (Q96BN9) Hypothetical | Q96BN9 | 78% | 1659 | 1207 |
| | | | | 16.5 kDa protein. | | | | |
| HEDEY26 | 1365264 | 108 | WUblastx.64 | (AAH24561) Similar to | AAH24561 | 70% | 910 | 725 |
| | | | | hypothetical gene | | | | |
| | | | | LOC125944. | | | | |
| HEFHJ61 | 1362894 | 109 | WUblastx.64 | GP36b glycoprotein - | pir\|G01447\|G01447 | 92% | 157 | 1104 |
| | | | | human | | | | |
| HEFHC80 | 1374282 | 111 | WUblastx.64 | (Q9W2Y3) CG2974 | Q9W2Y3 | 61% | 194 | 877 |
| | | | | protein. | | | | |
| HEDEJ55 | 1374272 | 112 | WUblastx.64 | (AAH08459) Unknown | AAH08459 | 100% | 12 | 707 |
| | | | | (protein for | | | | |
| | | | | IMAGE: 4250974) (Fra | | | | |
| HMFIH88 | 1374300 | 114 | WUblastx.64 | (Q8WUI1) Similar to | Q8WUI1 | 74% | 611 | 727 |
| | | | | RIKEN cDNA | | 85% | 192 | 725 |
| | | | | 0610006F02 gene. | | | | |
| HEFJN45 | 1355411 | 115 | WUblastx.64 | (Q9H111) DJ324O17.1.2 | Q9H111 | 99% | 11 | 493 |
| | | | | a novel protein similar to | | | | |
| | | | | drosophila CG11840, | | | | |
| HEFJN45 | 1363530 | 173 | WUblastx.64 | (Q9H111) DJ324O17.1.2 | Q9H111 | 100% | 44 | 850 |
| | | | | a novel protein similar to | | | | |
| | | | | drosophila CG11840, | | | | |
| HEFKA79 | 1362919 | 116 | WUblastx.64 | (Q9VD53) CG13409 | Q9VD53 | 51% | 4 | 540 |
| | | | | protein. | | 43% | 507 | 677 |
| | | | | | | 51% | 685 | 810 |
| HMFHX51 | 1374298 | 118 | WUblastx.64 | bone marrow stromal cell | pir\|A56836\|A56836 | 85% | 18 | 464 |
| | | | | surface protein BST-2 - | | | | |
| | | | | human | | | | |
| HEIDS26 | 1374291 | 119 | WUblastx.64 | (Q96S86) Proteoglycan | Q96S86 | 100% | 14 | 343 |
| | | | | link protein. | | 39% | 53 | 334 |
| HMFHL01 | 1374295 | 120 | WUblastx.64 | gene MAC25 protein - | pir\|I52825\|I52825 | 43% | 260 | 3 |
| | | | | human | | | | |
| HEIDA30 | 1367471 | 122 | WUblastx.64 | (Q9D1I6) 1110006I11 | Q9D1I6 | 84% | 105 | 539 |
| | | | | RIK protein. | | | | |
| HEDDM74 | 1365266 | 123 | WUblastx.64 | (AAH08365) Similar to | AAH08365 | 100% | 361 | 89 |
| | | | | hypothetical protein | | | | |
| | | | | AB030201 | | | | |
| HEENT17 | 1362742 | 126 | WUblastx.64 | (O60392) R32184_3. | O60392 | 68% | 112 | 513 |
| HEFHB48 | 1365213 | 127 | WUblastx.64 | (Q8WVR5) Hypothetical | Q8WVR5 | 100% | 253 | 360 |
| | | | | 4.1 kDa protein. | | | | |
| HNEMX50 | 1349300 | 129 | WUblastx.64 | (Q9P1C3) PRO2829. | Q9P1C3 | 58% | 305 | 421 |
| HEFJJ04 | 1362845 | 130 | WUblastx.64 | (Q9W020) CG9004 | Q9W020 | 37% | 45 | 926 |
| | | | | PROTEIN. | | | | |
| HEHMJ47 | 1367230 | 132 | WUblastx.64 | (AAH07438) Similar to | AAH07438 | 100% | 305 | 940 |
| | | | | RIKEN cDNA | | | | |
| | | | | 2610511E22 gene. | | | | |
| HMFHV45 | 1362799 | 134 | WUblastx.64 | (Q96NT5) CDNA | Q96NT5 | 85% | 13 | 621 |
| | | | | FLJ30107 fis, clone | | | | |
| | | | | BNGH41000198, weakly | | | | |
| | | | | similar to TET | | | | |
| HECJZ57 | 1365241 | 135 | WUblastx.64 | (Q95SS7) GH02671p. | Q95SS7 | 31% | 3095 | 1224 |
| HEFJW14 | 1362879 | 136 | WUblastx.64 | (O60392) R32184_3. | O60392 | 94% | 4 | 825 |
| | | | | | | 82% | 1045 | 1272 |
| | | | | | | 48% | 1729 | 1896 |
| HMFHC03 | 1362672 | 137 | WUblastx.64 | long-chain-fatty-acid- | pir\|JX0202\|JX0202 | 100% | 61 | 612 |
| | | | | CoA ligase (EC 6.2.1.3) - | | | | |
| | | | | human | | | | |
| HMFHC03 | 1365251 | 176 | WUblastx.64 | long-chain-fatty-acid- | pir\|JX0202\|JX0202 | 40% | 1259 | 1501 |
| | | | | CoA ligase (EC 6.2.1.3) - | | 100% | 70 | 1281 |
| | | | | human | | | | |
| HMFHC03 | 1365250 | 177 | WUblastx.64 | long-chain-fatty-acid- | pir\|JX0202\|JX0202 | 88% | 3 | 53 |
| | | | | CoA ligase (EC 6.2.1.3) - | | 100% | 50 | 1420 |
| | | | | human | | | | |
| HMFHE73 | 1362659 | 138 | WUblastx.64 | (AAH08073) Unknown | AAH08073 | 100% | 1003 | 1041 |
| | | | | (protein for MGC: 2908). | | 98% | 1155 | 1853 |
| HMFHE73 | 1362661 | 178 | WUblastx.64 | (AAH08073) Unknown | AAH08073 | 97% | 820 | 1059 |
| | | | | (protein for MGC: 2908). | | 100% | 26 | 784 |
| HECKH20 | 1365243 | 139 | WUblastx.64 | pHL E1F1 - human | pir\|I54810\|I54810 | 100% | 644 | 751 |
| | | | | | | 62% | 398 | 559 |
| HMFIH13 | 1348668 | 141 | WUblastx.64 | alternative splicing factor | pir\|B40040\|B40040 | 100% | 163 | 357 |
| | | | | ASF-2 - human | | 60% | 747 | 1130 |
| HTLRZ23 | 1396796 | 142 | WUblastx.64 | (O43736) integral | ITMA_HUMAN | 95% | 144 | 704 |
| | | | | membrane protein 2A | | 46% | 654 | 734 |
| | | | | (E25 protein). | | | | |
| HECKK69 | 1396680 | 179 | WUblastx.64 | (Q9H5V6) cDNA: | Q9H5V6 | 100% | 579 | 665 |
| | | | | FLJ22976 FIS, clone | | 96% | 572 | 664 |
| | | | | KAT11222 (fragment). | | | | |
| HDPXG11 | 1396714 | 145 | WUblastx.64 | (O75629) cellular | O75629 | 96% | 127 | 711 |
| | | | | repressor of E1A- | | | | |
| | | | | stimulated genes CREG. | | | | |
| HGTMQ07 | 1396731 | 146 | WUblastx.64 | (Q9P059) HSPC323 | Q9P059 | 70% | 421 | 570 |
| | | | | (fragment). | | 64% | 156 | 470 |
| HRDHH73 | 1396790 | 147 | WUblastx.64 | (BAB55035) cDNA | BAB55035 | 81% | 249 | 929 |
| | | | | FLJ14408 fis, clone | | 48% | 1017 | 1976 |
| | | | | HEMBA1004341. | | 48% | 903 | 1622 |
| | | | | | | 28% | 375 | 986 |
| HKVBG77 | 1396740 | 149 | WUblastx.64 | (Q8VCP9) RIKEN cDNA | Q8VCP9 | 56% | 93 | 1493 |
| | | | | 1200003C23 gene. | | | | |
| HXDCQ39 | 1396804 | 150 | WUblastx.64 | (AAK39431) Sideroflexin | AAK39431 | 60% | 69 | 980 |
| | | | | 4. | | | | |
| HECHZ42 | 1396662 | 151 | WUblastx.64 | alpha-2-macroglobulin | pir\|A94033\|MAHU | 31% | 1059 | 1886 |
| | | | | precursor [validated] - | | 28% | 1189 | 1344 |
| | | | | human | | 35% | 49 | 975 |
| HGTJD50 | 1396720 | 152 | WUblastx.64 | (Q9D909) | Q9D909 | 53% | 928 | 1005 |
| | | | | 1810013D05RIK protein. | | 58% | 183 | 803 |
| HEDDB56 | 1376996 | 153 | WUblastx.64 | (AAH24561) Similar to | AAH24561 | 70% | 116 | 301 |
| | | | | hypothetical gene | | | | |
| | | | | LOC125944. | | | | |
| HEDDB56 | 1396691 | 180 | WUblastx.64 | (AAH24561) Similar to | AAH24561 | 70% | 42 | 299 |
| | | | | hypothetical gene | | | | |
| | | | | LOC125944. | | | | |
| HEFIF14 | 1392273 | 156 | WUblastx.64 | (Q96BQ5) Similar to | Q96BQ5 | 90% | 799 | 1386 |
| | | | | RIKEN cDNA | | | | |
| | | | | 0610011N22 gene. | | | | |
| HEFIF14 | 1396708 | 184 | WUblastx.64 | (Q96BQ5) Similar to | Q96BQ5 | 100% | 90 | 869 |
| | | | | RIKEN cDNA | | | | |
| | | | | 0610011N22 gene. | | | | |
| HEDCP16 | 1396690 | 157 | WUblastx.64 | (AAH24561) Similar to | AAH24561 | 70% | 114 | 299 |
| | | | | hypothetical gene | | | | |
| | | | | LOC125944. | | | | |
| HDPAV18 | 1396658 | 159 | WUblastx.64 | (BAB55335) CDNA | BAB55335 | 80% | 569 | 1237 |
| | | | | FLJ14837 fis, clone | | | | |
| | | | | OVARC1001711 | | | | |
| HECKQ42 | 1386993 | 188 | WUblastx.64 | extensin-like cell wall | pir\|T10737\|T10737 | 33% | 65 | 559 |
| | | | | protein - sea-island cotton | | | | |
| HECKQ42 | 1379289 | 189 | WUblastx.64 | extensin-like cell wall | pir\|T10737\|T10737 | 33% | 80 | 574 |
| | | | | protein - sea-island cotton | | | | |
| HQQBQ63 | 1396759 | 163 | WUblastx.64 | (Q9QZT2) serpentine | Q9QZT2 | 34% | 24 | 665 |
| | | | | receptor. | | | | |
| HRDIJ66 | 1396797 | 164 | WUblastx.64 | (Q95LT8) Hypothetical | Q95LT8 | 95% | 12 | 1112 |
| | | | | 72.0 kDa protein. | | | | |
| HRDKC71 | 1396815 | 165 | WUblastx.64 | (Q9D1N9) DNA segment, | Q9D1N9 | 75% | 23 | 649 |
| | | | | Chr 9, Wayne State | | | | |
| | | | | University 149, expressed. | | | | |
| HQQDK22 | 1396814 | 166 | WUblastx.64 | (Q9QZT2) serpentine | Q9QZT2 | 32% | 42 | 953 |
| | | | | receptor. | | | | |
| HCBOG68 | 1243856 | 167 | WUblastx.64 | (Q96NZ9) Proline-rich | Q96NZ9 | 100% | 31 | 483 |
| | | | | acidic protein. | | | | |

Description of Table 3

[1064] Many polynucleotide sequences, such as EST sequences, are publicly available and accessible through sequence databases and may have been publicly available prior to conception of the present invention. Table 3 provides polynucleotide sequences that may be disclaimed according to certain embodiments of the invention. The first column provides a unique clone identifier, “Clone ID”, for a cDNA clone related to contig sequences disclosed in Table 1B. The second column provides the sequence identifier, “SEQ ID NO:X”, for contig sequences disclosed in Table 1A and/or 1B. The third column provides the unique contig identifier, “Contig ID:”, for contigs disclosed in Table 1B. The fourth column provides a unique integer ‘a’ where ‘a’ is any integer between 1 and the final nucleotide minus 15 of SEQ ID NO:X, and the fifth column provides a unique integer ‘b’ where ‘b’ is any integer between 15 and the final nucleotide of SEQ ID NO:X, where both a and b correspond to the positions of nucleotide residues shown in SEQ ID NO:X, and where b is greater than or equal to a+14. For each of the polynucleotides shown as SEQ ID NO:X, the uniquely defined integers can be substituted into the general formula of a−b, and used to describe polynucleotides which may be preferably excluded from the invention. In certain embodiments, preferably excluded from the invention are at least one, two, three, four, five, ten, or more of the polynucleotide sequence(s) having the accession number(s) disclosed in the sixth column of this Table (including for example, published sequence in connection with a particular BAC clone). In further embodiments, preferably excluded from the invention are the specific polynucleotide sequence(s) contained in the clones corresponding to at least one, two, three, four, five, ten, or more of the available material having the accession numbers identified in the sixth column of this Table (including for example, the actual sequence contained in an identified BAC clone). In no way is this listing meant to encompass all of the sequences which may be excluded by the general formula, it is just a representative example. All references available through these accessions are hereby incorporated by reference in their entirety.

TABLE 3

| | SEQ | | | | |
|---|---|---|---|---|---|
| cDNA | ID | Contig | EST Disclaimer | | Accession |
| Clone ID | NO: X | ID: | Range of a | Range of b | Numbers |

| | | | | |
|---|---|---|---|---|
| HERHC26 | 11 | 1337815 | 1-2368 | 15-2382 |
| HERHC24 | 12 | 1337814 | 1-510 | 15-524 |
| HEELM24 | 13 | 1338306 | 1-528 | 15-542 |
| HEFEZ39 | 14 | 1336526 | 1-517 | 15-531 |
| HEFFH42 | 15 | 1335777 | 1-1432 | 15-1446 |
| HLCOO14 | 16 | 1335382 | 1-1323 | 15-1337 |
| HLEFV28 | 17 | 1335435 | 1-483 | 15-497 |
| HLEGA38 | 18 | 1335424 | 1-507 | 15-521 |
| HPCBJ78 | 19 | 1337797 | 1-950 | 15-964 |
| HEDBJ87 | 20 | 1336693 | 1-481 | 15-495 |
| HEELE81 | 21 | 1335729 | 1-2586 | 15-2600 |
| HEFEW51 | 22 | 1335745 | 1-708 | 15-722 |
| HLEFO22 | 23 | 1337615 | 1-550 | 15-564 |
| HEELG41 | 24 | 1335998 | 1-521 | 15-535 |
| HNEMP21 | 25 | 1344654 | 1-1207 | 15-1221 |
| HNEMU30 | 26 | 1344636 | 1-776 | 15-790 |
| HNEMO56 | 27 | 1344633 | 1-799 | 15-813 |
| HEELQ12 | 28 | 1335802 | 1-687 | 15-701 |
| HLCOY89 | 29 | 1335885 | 1-889 | 15-903 |
| HLCPI67 | 30 | 1335342 | 1-1217 | 15-1231 |
| HCPRA19 | 31 | 1343653 | 1-2019 | 15-2033 |
| HEFEN82 | 32 | 1335771 | 1-1442 | 15-1456 |
| HEELL43 | 33 | 1337306 | 1-522 | 15-536 |
| HLEFG68 | 34 | 1335798 | 1-761 | 15-775 |
| HERHL91 | 35 | 1339169 | 1-480 | 15-494 |
| HEFFD22 | 36 | 1339724 | 1-489 | 15-503 |
| HPCCR42 | 37 | 1337796 | 1-1101 | 15-1115 |
| HECHI83 | 38 | 1337091 | 1-527 | 15-541 |
| HEFEL28 | 39 | 1342969 | 1-622 | 15-636 |
| HLCON84 | 40 | 1337134 | 1-1185 | 15-1199 |
| HLEFK80 | 41 | 1335373 | 1-379 | 15-393 |
| HLCPQ02 | 42 | 1337518 | 1-471 | 15-485 |
| HLEFR48 | 43 | 1338572 | 1-876 | 15-890 |
| HEFFA92 | 44 | 1344603 | 1-1015 | 15-1029 |
| HLEFF44 | 45 | 1345360 | 1-2546 | 15-2560 |
| HLCOG83 | 46 | 1336780 | 1-328 | 15-342 |
| HLEFV31 | 47 | 1335799 | 1-485 | 15-499 |
| HLCOW38 | 48 | 1339959 | 1-524 | 15-538 |
| HEFEP03 | 49 | 1344605 | 1-1403 | 15-1417 |
| HEFFD82 | 50 | 1344613 | 1-1113 | 15-1127 |
| HECHH44 | 51 | 1353379 | 1-829 | 15-843 |
| HLEGA47 | 52 | 1335348 | 1-395 | 15-409 |
| HEDBJ79 | 53 | 1344635 | 1-2337 | 15-2351 |
| HEEML62 | 54 | 1344608 | 1-1299 | 15-1313 |
| HEELB16 | 55 | 1344619 | 1-1934 | 15-1948 |
| HEDBH12 | 56 | 1353380 | 1-244 | 15-258 |
| HABDM96 | 57 | 1337770 | 1-484 | 15-498 |
| HPCBB59 | 58 | 1353385 | 1-371 | 15-385 |
| HERHD36 | 59 | 1322788 | 1-613 | 15-627 |
| HIGAT21 | 60 | 1341980 | 1-873 | 15-887 |
| HIGBG18 | 61 | 1337744 | 1-1127 | 15-1141 |
| HIGBQ67 | 62 | 1344625 | 1-1173 | 15-1187 |
| HPNCW15 | 63 | 1337821 | 1-411 | 15-425 |
| HIGAT76 | 64 | 1337712 | 1-522 | 15-536 |
| HPNCC51 | 65 | 1343401 | 1-711 | 15-725 |
| HIGBR51 | 66 | 1337743 | 1-453 | 15-467 |
| HECHQ69 | 67 | 1365244 | 1-676 | 15-690 |
| HECJN68 | 68 | 1365231 | 1-923 | 15-937 |
| HEFJO40 | 69 | 1362923 | 1-2365 | 15-2379 |
| HEGLK47 | 70 | 1367720 | 1-1224 | 15-1238 |
| HEDDJ18 | 71 | 1362820 | 1-1220 | 15-1234 |
| HEGLA38 | 72 | 1367491 | 1-877 | 15-891 |
| HEHXT39 | 73 | 1365200 | 1-615 | 15-629 |
| HMFHI61 | 74 | 1374294 | 1-1167 | 15-1181 |
| HEHNH91 | 75 | 1348961 | 1-629 | 15-643 |
| HECJZ49 | 76 | 1374268 | 1-1018 | 15-1032 |
| HPCCR42 | 77 | 1337796 | 1-1101 | 15-1115 |
| HECHP58 | 78 | 1362970 | 1-472 | 15-486 |
| HEFGF49 | 79 | 1366233 | 1-1043 | 15-1057 |
| HEFJI37 | 80 | 1365175 | 1-1435 | 15-1449 |
| HEDCP16 | 81 | 1365248 | 1-555 | 15-569 |
| HECJR25 | 82 | 1365243 | 1-889 | 15-903 |
| HEEMT12 | 83 | 1374274 | 1-609 | 15-623 |
| HECHX69 | 84 | 1350954 | 1-781 | 15-795 |
| HEGLP63 | 85 | 1374286 | 1-793 | 15-807 |
| HEFIA60 | 86 | 1362932 | 1-667 | 15-681 |
| HEFID84 | 87 | 1365275 | 1-1128 | 15-1142 |
| HEHXR32 | 88 | 1349325 | 1-2121 | 15-2135 |
| HMFHW53 | 89 | 1365703 | 1-635 | 15-649 |
| HEDCZ72 | 90 | 1362945 | 1-1487 | 15-1501 |
| HECKQ42 | 91 | 1374269 | 1-573 | 15-587 |
| HEHXJ43 | 92 | 1374289 | 1-678 | 15-692 |
| HECKS63 | 93 | 1374270 | 1-863 | 15-877 |
| HEDEQ16 | 94 | 1374273 | 1-962 | 15-976 |
| HEENI83 | 95 | 1374276 | 1-972 | 15-986 |
| HMFHN24 | 96 | 1362928 | 1-1913 | 15-1927 |
| HMFHX66 | 97 | 1362809 | 1-4379 | 15-4393 |
| HEENV67 | 98 | 1374278 | 1-1178 | 15-1192 |
| HECIB71 | 99 | 1374267 | 1-1216 | 15-1230 |
| HEHNE29 | 100 | 1374288 | 1-1044 | 15-1058 |
| HEHXS16 | 101 | 1374290 | 1-735 | 15-749 |
| HEDDB56 | 102 | 1365263 | 1-555 | 15-569 |
| HEENK36 | 103 | 1362901 | 1-1259 | 15-1273 |
| HMFHT07 | 104 | 1374297 | 1-667 | 15-681 |
| HNEMX81 | 105 | 1365284 | 1-1681 | 15-1695 |
| HIGBR51 | 106 | 1337743 | 1-453 | 15-467 |
| HECKK69 | 107 | 1365199 | 1-558 | 15-572 |
| HEDEY26 | 108 | 1365264 | 1-1200 | 15-1214 |
| HEFHJ61 | 109 | 1362894 | 1-1633 | 15-1647 |
| HEHXH94 | 110 | 1349088 | 1-591 | 15-605 |
| HEFHC80 | 111 | 1374282 | 1-942 | 15-956 |
| HEDEJ55 | 112 | 1374272 | 1-1164 | 15-1178 |
| HEEMW15 | 113 | 1374275 | 1-1027 | 15-1041 |
| HMFIH88 | 114 | 1374300 | 1-715 | 15-729 |
| HEFJN45 | 115 | 1355411 | 1-481 | 15-495 |
| HEFKA79 | 116 | 1362919 | 1-1687 | 15-1701 |
| HEGLH36 | 117 | 1374285 | 1-396 | 15-410 |
| HMFHX51 | 118 | 1374298 | 1-966 | 15-980 |
| HEIDS26 | 119 | 1374291 | 1-845 | 15-859 |
| HMFHL01 | 120 | 1374295 | 1-430 | 15-444 |
| HECKQ90 | 121 | 1349315 | 1-1230 | 15-1244 |
| HEIDA30 | 122 | 1367471 | 1-750 | 15-764 |
| HEDDM74 | 123 | 1365266 | 1-729 | 15-743 |
| HEHXC34 | 124 | 1365189 | 1-464 | 15-478 |
| HEHXL26 | 125 | 1351600 | 1-958 | 15-972 |
| HEENT17 | 126 | 1362742 | 1-547 | 15-561 |
| HEFHB48 | 127 | 1365213 | 1-1419 | 15-1433 |
| HEFIF14 | 128 | 1365201 | 1-841 | 15-855 |
| HNEMX50 | 129 | 1349300 | 1-487 | 15-501 |
| HEFJJ04 | 130 | 1362845 | 1-1166 | 15-1180 |
| HEHXW79 | 131 | 1365188 | 1-383 | 15-397 |
| HEHMJ47 | 132 | 1367230 | 1-999 | 15-1013 |
| HRCRE68 | 133 | 1365255 | 1-5733 | 15-5747 |
| HMFHV45 | 134 | 1362799 | 1-1248 | 15-1262 |
| HECJZ57 | 135 | 1365241 | 1-3265 | 15-3279 |
| HEFJW14 | 136 | 1362879 | 1-2380 | 15-2394 |
| HMFHC03 | 137 | 1362672 | 1-600 | 15-614 |
| HMFHE73 | 138 | 1362659 | 1-1847 | 15-1861 |
| HECKH20 | 139 | 1365243 | 1-889 | 15-903 |
| HMFHH91 | 140 | 1365336 | 1-1184 | 15-1198 |
| HMFIH13 | 141 | 1348668 | 1-1912 | 15-1926 |
| HTLRZ23 | 142 | 1396796 | 1-724 | 15-738 |
| HECKK69 | 143 | 1387187 | 1-656 | 15-670 |
| HTLRO18 | 144 | 1396812 | 1-617 | 15-631 |
| HDPXG11 | 145 | 1396714 | 1-2035 | 15-2049 |
| HGTMQ07 | 146 | 1396731 | 1-961 | 15-975 |
| HRDHH73 | 147 | 1396790 | 1-2321 | 15-2335 |
| HRCSY77 | 148 | 1396782 | 1-600 | 15-614 |
| HKVBG77 | 149 | 1396740 | 1-2068 | 15-2082 |
| HXDCQ39 | 150 | 1396804 | 1-1348 | 15-1362 |
| HECHZ42 | 151 | 1396662 | 1-1998 | 15-2012 |
| HGTJD50 | 152 | 1396720 | 1-1107 | 15-1121 |
| HEDDB56 | 153 | 1376996 | 1-559 | 15-573 |
| HECHS69 | 154 | 1387369 | 1-996 | 15-1010 |
| HEFIA60 | 155 | 1379056 | 1-673 | 15-687 |
| HEFIF14 | 156 | 1392273 | 1-1372 | 15-1386 |
| HEDCP16 | 157 | 1396690 | 1-555 | 15-569 |
| HEDEX64 | 158 | 1384784 | 1-560 | 15-574 |
| HDPAV18 | 159 | 1396658 | 1-1631 | 15-1645 |
| HECKQ42 | 160 | 1374269 | 1-573 | 15-587 |
| HGTLT88 | 161 | 1396738 | 1-1179 | 15-1193 |
| HRCSG16 | 162 | 1396779 | 1-549 | 15-563 |
| HQQBQ63 | 163 | 1396759 | 1-796 | 15-810 |
| HRDIJ66 | 164 | 1396797 | 1-2253 | 15-2267 |
| HRDKC71 | 165 | 1396815 | 1-721 | 15-735 |
| HQQDK22 | 166 | 1396814 | 1-4341 | 15-4355 |
| HCBOG68 | 167 | 1243856 | 1-691 | 15-705 |

Description of Table 4

[1065] Table 4 provides a key to the tissue/cell source identifier code disclosed in Table 1B, column 8. Column 1 provides the tissue/cell source identifier code disclosed in Table 1B, Column 8. Columns 2-5 provide a description of the tissue or cell source. Note that “Description” and “Tissue” sources (i.e., columns 2 and 3) having the prefix “a_” indicates organs, tissues, or cells derived from “adult” sources. Codes corresponding to diseased tissues are indicated in column 6 with the word “disease.” The use of the word “disease” in column 6 is non-limiting. The tissue or cell source may be specific (e.g., a neoplasm), or may be disease-associated (e.g., a tissue sample from a normal portion of a diseased organ). Furthermore, tissues and/or cells lacking the “disease” designation may still be derived from sources directly or indirectly involved in a disease state or disorder, and therefore may have a further utility in that disease state or disorder. In numerous cases where the tissue/cell source is a library, column 7 identifies the vector used to generate the library.

TABLE 4

| | | | | Cell | | |
|---|---|---|---|---|---|---|
| Code | Description | Tissue | Organ | Line | Disease | Vector |
| H0004 | Human Adult Spleen | Human Adult | Spleen | | | Uni-ZAP XR |
| | | Spleen | | | | |
| H0009 | Human Fetal Brain | | | | | Uni-ZAP XR |
| H0011 | Human Fetal Kidney | Human Fetal | Kidney | | | Uni-ZAP XR |
| | | Kidney | | | | |
| H0012 | Human Fetal Kidney | Human Fetal | Kidney | | | Uni-ZAP XR |
| | | Kidney | | | | |
| H0013 | Human 8 Week Whole | Human 8 Week Old | Embryo | | | Uni-ZAP XR |
| | Embryo | Embryo | | | | |
| H0014 | Human Gall Bladder | Human Gall Bladder | Gall Bladder | | | Uni-ZAP XR |
| H0015 | Human Gall Bladder, | Human Gall Bladder | Gall Bladder | | | Uni-ZAP XR |
| | fraction II | | | | | |
| H0024 | Human Fetal Lung III | Human Fetal Lung | Lung | | | Uni-ZAP XR |
| H0029 | Human Pancreas | Human Pancreas | Pancreas | | | Uni-ZAP XR |
| H0030 | Human Placenta | | | | | Uni-ZAP XR |
| H0031 | Human Placenta | Human Placenta | Placenta | | | Uni-ZAP XR |
| H0032 | Human Prostate | Human Prostate | Prostate | | | Uni-ZAP XR |
| H0036 | Human Adult Small | Human Adult Small | Small Int. | | | Uni-ZAP XR |
| | Intestine | Intestine | | | | |
| H0038 | Human Testes | Human Testes | Testis | | | Uni-ZAP XR |
| H0039 | Human Pancreas Tumor | Human Pancreas | Pancreas | | disease | Uni-ZAP XR |
| | | Tumor | | | | |
| H0040 | Human Testes Tumor | Human Testes | Testis | | disease | Uni-ZAP XR |
| | | Tumor | | | | |
| H0041 | Human Fetal Bone | Human Fetal Bone | Bone | | | Uni-ZAP XR |
| H0042 | Human Adult | Human Adult | Lung | | | Uni-ZAP XR |
| | Pulmonary | Pulmonary | | | | |
| H0044 | Human Cornea | Human Cornea | eye | | | Uni-ZAP XR |
| H0046 | Human Endometrial | Human Endometrial | Uterus | | disease | Uni-ZAP XR |
| | Tumor | Tumor | | | | |
| H0047 | Human Fetal Liver | Human Fetal Liver | Liver | | | Uni-ZAP XR |
| H0049 | Human Fetal Kidney | Human Fetal | Kidney | | | Uni-ZAP XR |
| | | Kidney | | | | |
| H0050 | Human Fetal Heart | Human Fetal Heart | Heart | | | Uni-ZAP XR |
| H0051 | Human Hippocampus | Human | Brain | | | Uni-ZAP XR |
| | | Hippocampus | | | | |
| H0052 | Human Cerebellum | Human Cerebellum | Brain | | | Uni-ZAP XR |
| H0056 | Human Umbilical Vein, | Human Umbilical | Umbilical vein | | | Uni-ZAP XR |
| | Endo. remake | Vein Endothelial | | | | |
| | | Cells | | | | |
| H0057 | Human Fetal Spleen | | | | | Uni-ZAP XR |
| H0059 | Human Uterine Cancer | Human Uterine | Uterus | | disease | Lambda ZAP II |
| | | Cancer | | | | |
| H0061 | Human Macrophage | Human Macrophage | Blood | Cell | | pBluescript |
| | | | | Line | | |
| H0063 | Human Thymus | Human Thymus | Thymus | | | Uni-ZAP XR |
| H0069 | Human Activated T- | Activated T-Cells | Blood | Cell | | Uni-ZAP XR |
| | Cells | | | Line | | |
| H0071 | Human Infant Adrenal | Human Infant | Adrenal gland | | | Uni-ZAP XR |
| | Gland | Adrenal Gland | | | | |
| H0081 | Human Fetal Epithelium | Human Fetal Skin | Skin | | | Uni-ZAP XR |
| | (Skin) | | | | | |
| H0083 | HUMAN JURKAT | Jurkat Cells | | | | Uni-ZAP XR |
| | MEMBRANE BOUND | | | | | |
| | POLYSOMES | | | | | |
| H0085 | Human Colon | Human Colon | | | | Lambda ZAP II |
| H0086 | Human epithelioid | Epithelioid | Sk Muscle | | disease | Uni-ZAP XR |
| | sarcoma | Sarcoma, muscle | | | | |
| H0087 | Human Thymus | Human Thymus | | | | pBluescript |
| H0090 | Human T-Cell | T-Cell Lymphoma | T-Cell | | disease | Uni-ZAP XR |
| | Lymphoma | | | | | |
| H0092 | Human Pancreas Tumor | Human Pancreas | Pancreas | | disease | Uni-ZAP XR |
| | | Tumor | | | | |
| H0098 | Human Adult Liver, | Human Adult Liver | Liver | | | Uni-ZAP XR |
| | subtracted | | | | | |
| H0099 | Human Lung Cancer, | Human Lung | Lung | | | pBluescript |
| | subtracted | Cancer | | | | |
| H0100 | Human Whole Six | Human Whole Six | Embryo | | | Uni-ZAP XR |
| | Week Old Embryo | Week Old Embryo | | | | |
| H0101 | Human 7 Weeks Old | Human Whole 7 | Embryo | | | Lambda ZAP II |
| | Embryo, subtracted | Week Old Embryo | | | | |
| H0106 | Human Right | Human Brain, right | Brain | | | Uni-ZAP XR |
| | Hemisphere of Brain, | hemisphere | | | | |
| | subtrac | | | | | |
| H0107 | Human Infant Adrenal | Human Infant | Adrenal gland | | | pBluescript |
| | Gland, subtracted | Adrenal Gland | | | | |
| H0108 | Human Adult Lymph | Human Adult | Lymph Node | | | Uni-ZAP XR |
| | Node, subtracted | Lymph Node | | | | |
| H0110 | Human Old Ovary, | Human Old Ovary | Ovary | | | pBluescript |
| | subtracted | | | | | |
| H0111 | Human Placenta, | Human Placenta | Placenta | | | pBluescript |
| | subtracted | | | | | |
| H0112 | Human Parathyroid | Human Parathyroid | Parathyroid | | | pBluescript |
| | Tumor, subtracted | Tumor | | | | |
| H0116 | Human Thymus Tumor, | Human Thymus | Thymus | | | pBluescript |
| | subtracted | Tumor | | | | |
| H0117 | Human Uterine Cancer, | Human Uterine | Uterus | | | pBluescript |
| | subtracted | Cancer | | | | |
| H0120 | Human Adult Spleen, | Human Adult | Spleen | | | Uni-ZAP XR |
| | subtracted | Spleen | | | | |
| H0122 | Human Adult Skeletal | Human Skeletal | Sk Muscle | | | Uni-ZAP XR |
| | Muscle | Muscle | | | | |
| H0123 | Human Fetal Dura | Human Fetal Dura | Brain | | | Uni-ZAP XR |
| | Mater | Mater | | | | |
| H0124 | Human | Human | Sk Muscle | | disease | Uni-ZAP XR |
| | Rhabdomyosarcoma | Rhabdomyosarcoma | | | | |
| H0125 | Cem cells | Cyclohexamide | Blood | Cell | | Uni-ZAP XR |
| | cyclohexamide treated | Treated Cem, | | Line | | |
| | | Jurkat, Raji, | | | | |
| | | and Supt | | | | |
| H0130 | LNCAP untreated | LNCAP Cell Line | Prostate | Cell | | Uni-ZAP XR |
| | | | | Line | | |
| H0131 | LNCAP + o.3 nM R1881 | LNCAP Cell Line | Prostate | Cell | | Uni-ZAP XR |
| | | | | Line | | |
| H0132 | LNCAP + 30 nM R1881 | LNCAP Cell Line | Prostate | Cell | | Uni-ZAP XR |
| | | | | Line | | |
| H0134 | Raji Cells, | Cyclohexamide | Blood | Cell | | Uni-ZAP XR |
| | cyclohexamide treated | Treated Cem, | | Line | | |
| | | Jurkat, Raji, | | | | |
| | | and Supt | | | | |
| H0135 | Human Synovial | Human Synovial | Synovium | | | Uni-ZAP XR |
| | Sarcoma | Sarcoma | | | | |
| H0136 | Supt Cells, | Cyclohexamide | Blood | Cell | | Uni-ZAP XR |
| | cyclohexamide treated | Treated Cem, | | Line | | |
| | | Jurkat, Raji, | | | | |
| | | and Supt | | | | |
| H0140 | Activated T-Cells, 8 hrs. | Activated T-Cells | Blood | Cell | | Uni-ZAP XR |
| | | | | Line | | |
| H0141 | Activated T-Cells, 12 hrs. | Activated T-Cells | Blood | Cell | | Uni-ZAP XR |
| | | | | Line | | |
| H0142 | MCF7 Cell Line | MCF7 Cell line | Breast | Cell | | Uni-ZAP XR |
| | | | | Line | | |
| H0144 | Nine Week Old Early | 9 Wk Old Early | Embryo | | | Uni-ZAP XR |
| | Stage Human | Stage Human | | | | |
| H0147 | Human Adult Liver | Human Adult Liver | Liver | | | Uni-ZAP XR |
| H0150 | Human Epididymus | Epididymis | Testis | | | Uni-ZAP XR |
| H0151 | Early Stage Human | Human Fetal Liver | Liver | | | Uni-ZAP XR |
| | Liver | | | | | |
| H0156 | Human Adrenal Gland | Human Adrenal | Adrenal Gland | | disease | Uni-ZAP XR |
| | Tumor | Gland Tumor | | | | |
| H0158 | Activated T-Cells, 4 hrs., | Activated T-Cells | Blood | Cell | | Uni-ZAP XR |
| | ligation 2 | | | Line | | |
| H0159 | Activated T-Cells, 8 hrs., | Activated T-Cells | Blood | Cell | | Uni-ZAP XR |
| | ligation 2 | | | Line | | |
| H0163 | Human Synovium | Human Synovium | Synovium | | | Uni-ZAP XR |
| H0165 | Human Prostate Cancer, | Human Prostate | Prostate | | disease | Uni-ZAP XR |
| | Stage B2 | Cancer, stage B2 | | | | |
| H0166 | Human Prostate Cancer, | Human Prostate | Prostate | | disease | Uni-ZAP XR |
| | Stage B2 fraction | Cancer, stage B2 | | | | |
| H0169 | Human Prostate Cancer, | Human Prostate | Prostate | | disease | Uni-ZAP XR |
| | Stage C fraction | Cancer, stage C | | | | |
| H0170 | 12 Week Old Early | Twelve Week Old | Embryo | | | Uni-ZAP XR |
| | Stage Human | Early Stage Human | | | | |
| H0171 | 12 Week Old Early | Twelve Week Old | Embryo | | | Uni-ZAP XR |
| | Stage Human, II | Early Stage Human | | | | |
| H0172 | Human Fetal Brain, | Human Fetal Brain | Brain | | | Lambda ZAP II |
| | random primed | | | | | |
| H0178 | Human Fetal Brain | Human Fetal Brain | Brain | | | Uni-ZAP XR |
| H0179 | Human Neutrophil | Human Neutrophil | Blood | Cell | | Uni-ZAP XR |
| | | | | Line | | |
| H0181 | Human Primary Breast | Human Primary | Breast | | disease | Uni-ZAP XR |
| | Cancer | Breast Cancer | | | | |
| H0187 | Resting T-Cell | T-Cells | Blood | Cell | | Lambda ZAP II |
| | | | | Line | | |
| H0188 | Human Normal Breast | Human Normal | Breast | | | Uni-ZAP XR |
| | | Breast | | | | |
| H0189 | Human Resting | Human | Blood | Cell | | Uni-ZAP XR |
| | Macrophage | Macrophage/ | | Line | | |
| | | Monocytes | | | | |
| H0194 | Human Cerebellum, | Human Cerebellum | Brain | | | pBluescript |
| | subtracted | | | | | |
| H0196 | Human | Human | Heart | | | Uni-ZAP XR |
| | Cardiomyopathy, | Cardiomyopathy | | | | |
| | subtracted | | | | | |
| H0197 | Human Fetal Liver, | Human Fetal Liver | Liver | | | Uni-ZAP XR |
| | subtracted | | | | | |
| H0199 | Human Fetal Liver, | Human Fetal Liver | Liver | | | Uni-ZAP XR |
| | subtracted, neg clone | | | | | |
| H0201 | Human Hippocampus, | Human | Brain | | | pBluescript |
| | subtracted | Hippocampus | | | | |
| H0202 | Jurkat Cells, | Cyclohexamide | Blood | Cell | | Uni-ZAP XR |
| | cyclohexamide treated, | Treated Cem, | | Line | | |
| | subtraction | Jurkat, Raji, | | | | |
| | | and Supt | | | | |
| H0204 | Human Colon Cancer, | Human Colon | Colon | | | pBluescript |
| | subtracted | Cancer | | | | |
| H0207 | LNCAP, differential | LNCAP Cell Line | Prostate | Cell | | pBluescript |
| | expression | | | Line | | |
| H0208 | Early Stage Human | Human Fetal Lung | Lung | | | pBluescript |
| | Lung, subtracted | | | | | |
| H0212 | Human Prostate, | Human Prostate | Prostate | | | pBluescript |
| | subtracted | | | | | |
| H0213 | Human Pituitary, | Human Pituitary | | | | Uni-ZAP XR |
| | subtracted | | | | | |
| H0216 | Supt cells, | Cyclohexamide | Blood | Cell | | pBluescript |
| | cyclohexamide treated, | Treated Cem, | | Line | | |
| | subtracted | Jurkat, Raji, | | | | |
| | | and Supt | | | | |
| H0218 | Activated T-Cells, 0 hrs, | Activated T-Cells | Blood | Cell | | Uni-ZAP XR |
| | subtracted | | | Line | | |
| H0220 | Activated T-Cells, 4 hrs, | Activated T-Cells | Blood | Cell | | Uni-ZAP XR |
| | subtracted | | | Line | | |
| H0224 | Activated T-Cells, 12 hrs, | Activated T-Cells | Blood | Cell | | Uni-ZAP XR |
| | subtracted | | | Line | | |
| H0231 | Human Colon, | Human Colon | | | | pBluescript |
| | subtraction | | | | | |
| H0239 | Human Kidney Tumor | Human Kidney | Kidney | | disease | Uni-ZAP XR |
| | | Tumor | | | | |
| H0246 | Human Fetal Liver- | Human Fetal Liver | Liver | | | Uni-ZAP XR |
| | Enzyme subtraction | | | | | |
| H0247 | Human Membrane | Human Membrane | Blood | Cell | | Uni-ZAP XR |
| | Bound Polysomes- | Bound Polysomes | | Line | | |
| | Enzyme Subtraction | | | | | |
| H0250 | Human Activated | Human Monocytes | | | | Uni-ZAP XR |
| | Monocytes | | | | | |
| H0251 | Human | Human | Cartilage | | disease | Uni-ZAP XR |
| | Chondrosarcoma | Chondrosarcoma | | | | |
| H0252 | Human Osteosarcoma | Human | Bone | | disease | Uni-ZAP XR |
| | | Osteosarcoma | | | | |
| H0253 | Human adult testis, large | Human Adult Testis | Testis | | | Uni-ZAP XR |
| | inserts | | | | | |
| H0255 | breast lymph node | Breast Lymph Node | Lymph Node | | | Lambda ZAP II |
| | CDNA library | | | | | |
| H0257 | HL-60, PMA 4 H | HL-60 Cells, PMA | Blood | Cell | | Uni-ZAP XR |
| | | stimulated 4 H | | Line | | |
| H0261 | H. cerebellum, Enzyme | Human Cerebellum | Brain | | | Uni-ZAP XR |
| | subtracted | | | | | |
| H0263 | human colon cancer | Human Colon | Colon | | disease | Lambda ZAP II |
| | | Cancer | | | | |
| H0264 | human tonsils | Human Tonsil | Tonsil | | | Uni-ZAP XR |
| H0265 | Activated T-Cell | T-Cells | Blood | Cell | | Uni-ZAP XR |
| | (12 hs)/Thiouridine | | | Line | | |
| | labelledEco | | | | | |
| H0266 | Human Microvascular | HMEC | Vein | Cell | | Lambda ZAP II |
| | Endothelial Cells, fract. A | | | Line | | |
| H0267 | Human Microvascular | HMEC | Vein | Cell | | Lambda ZAP II |
| | Endothelial Cells, fract. B | | | Line | | |
| H0268 | Human Umbilical Vein | HUVE Cells | Umbilical vein | Cell | | Lambda ZAP II |
| | Endothelial Cells, fract. A | | | Line | | |
| H0269 | Human Umbilical Vein | HUVE Cells | Umbilical vein | Cell | | Lambda ZAP II |
| | Endothelial Cells, fract. B | | | Line | | |
| H0270 | HPAS (human pancreas, | Human Pancreas | Pancreas | | | Uni-ZAP XR |
| | subtracted) | | | | | |
| H0271 | Human Neutrophil, | Human Neutrophil - | Blood | Cell | | Uni-ZAP XR |
| | Activated | Activated | | Line | | |
| H0280 | K562 + PMA (36 hrs) | K562 Cell line | cell line | Cell | | ZAP Express |
| | | | | Line | | |
| H0286 | Human OB MG63 | Human | Bone | Cell | | Uni-ZAP XR |
| | treated (10 nM E2) | Osteoblastoma | | Line | | |
| | fraction I | MG63 cell line | | | | |
| H0288 | Human OB HOS control | Human | Bone | Cell | | Uni-ZAP XR |
| | fraction I | Osteoblastoma HOS | | Line | | |
| | | cell line | | | | |
| H0290 | Human OB HOS treated | Human | Bone | Cell | | Uni-ZAP XR |
| | (1 nM E2) fraction I | Osteoblastoma HOS | | Line | | |
| | | cell line | | | | |
| H0292 | Human OB HOS treated | Human | Bone | Cell | | Uni-ZAP XR |
| | (10 nM E2) fraction I | Osteoblastoma HOS | | Line | | |
| | | cell line | | | | |
| H0294 | Amniotic Cells - TNF | Amniotic Cells - | Placenta | Cell | | Uni-ZAP XR |
| | induced | TNF induced | | Line | | |
| H0295 | Amniotic Cells - | Amniotic Cells - | Placenta | Cell | | Uni-ZAP XR |
| | Primary Culture | Primary Culture | | Line | | |
| H0305 | CD34 positive cells | CD34 Positive Cells | Cord Blood | | | ZAP Express |
| | (Cord Blood) | | | | | |
| H0306 | CD34 depleted Buffy | CD34 Depleted | Cord Blood | | | ZAP Express |
| | Coat (Cord Blood) | Buffy Coat (Cord | | | | |
| | | Blood) | | | | |
| H0309 | Human Chronic | Synovium, Chronic | Synovium | | disease | Uni-ZAP XR |
| | Synovitis | Synovitis/ | | | | |
| | | Osteoarthritis | | | | |
| H0310 | human caudate nucleus | Brain | Brain | | | Uni-ZAP XR |
| H0313 | human pleural cancer | pleural cancer | | | disease | pBluescript |
| H0316 | HUMAN STOMACH | Human Stomach | Stomach | | | Uni-ZAP XR |
| H0318 | HUMAN B CELL | Human B Cell | Lymph Node | | disease | Uni-ZAP XR |
| | LYMPHOMA | Lymphoma | | | | |
| H0327 | human corpus colosum | Human Corpus | Brain | | | Uni-ZAP XR |
| | | Callosum | | | | |
| H0328 | human ovarian cancer | Ovarian Cancer | Ovary | | disease | Uni-ZAP XR |
| H0329 | Dermatofibrosarcoma | Dermato- | Skin | | disease | Uni-ZAP XR |
| | Protuberance | fibrosarcoma | | | | |
| | | Protuberans | | | | |
| H0331 | Hepatocellular Tumor | Hepatocellular | Liver | | disease | Lambda ZAP II |
| | | Tumor | | | | |
| H0333 | Hemangiopericytoma | Hemangio- | Blood vessel | | disease | Lambda ZAP II |
| | | pericytoma | | | | |
| H0334 | Kidney cancer | Kidney Cancer | Kidney | | disease | Uni-ZAP XR |
| H0339 | Duodenum | Duodenum | | | | Uni-ZAP XR |
| H0341 | Bone Marrow Cell Line | Bone Marrow Cell | Bone Marrow | Cell | | Uni-ZAP XR |
| | (RS4; 11) | Line RS4; 11 | | Line | | |
| H0343 | stomach cancer (human) | Stomach Cancer - | | | disease | Uni-ZAP XR |
| | | 5383A (human) | | | | |
| H0345 | SKIN | Skin - 4000868H | Skin | | | Uni-ZAP XR |
| H0349 | human adult liver cDNA | Human Adult Liver | Liver | | | pCMVSport 1 |
| | library | | | | | |
| H0351 | Glioblastoma | Glioblastoma | Brain | | disease | Uni-ZAP XR |
| H0352 | Wilm's tumor | Wilm's Tumor | | | disease | Uni-ZAP XR |
| H0354 | Human Leukocytes | Human Leukocytes | Blood | Cell | | pCMVSport 1 |
| | | | | Line | | |
| H0355 | Human Liver | Human Liver, | | | | pCMVSport 1 |
| | | normal Adult | | | | |
| H0356 | Human Kidney | Human Kidney | Kidney | | | pCMVSport 1 |
| H0363 | Human Brain Medulla, | Human Brain | | | | pBluescript |
| | subtracted | Medulla | | | | |
| H0366 | L428 cell line | L428 | | | | ZAP Express |
| H0370 | H. Lymph node breast | Lymph node with | | | disease | Uni-ZAP XR |
| | Cancer | Met. Breast Cancer | | | | |
| H0372 | Human Testes | Human Testes | Testis | | | pCMVSport 1 |
| H0373 | Human Heart | Human Adult Heart | Heart | | | pCMVSport 1 |
| H0374 | Human Brain | Human Brain | | | | pCMVSport 1 |
| H0375 | Human Lung | Human Lung | | | | pCMVSport 1 |
| H0376 | Human Spleen | Human Adult | Spleen | | | pCMVSport 1 |
| | | Spleen | | | | |
| H0379 | Human Tongue, frac 1 | Human Tongue | | | | pSport1 |
| H0383 | Human Prostate BPH, | Human Prostate | | | | Uni-ZAP XR |
| | re-excision | BPH | | | | |
| H0390 | Human Amygdala | Human Amygdala | | | disease | pBluescript |
| | Depression, re-excision | Depression | | | | |
| H0391 | H. Meningioma, M6 | Human Meningioma | brain | | | pSport1 |
| H0392 | H. Meningioma, M1 | Human Meningioma | brain | | | pSport1 |
| H0393 | Fetal Liver, subtraction | Human Fetal Liver | Liver | | | pBluescript |
| | II | | | | | |
| H0399 | Human Kidney Cortex, | Human Kidney | | | | Lambda ZAP II |
| | re-rescue | Cortex | | | | |
| H0402 | CD34 depleted Buffy | CD34 Depleted | Cord Blood | | | ZAP Express |
| | Coat (Cord Blood), re- | Buffy Coat (Cord | | | | |
| | excision | Blood) | | | | |
| H0406 | H Amygdala | Human Amygdala | | | | Uni-ZAP XR |
| | Depression, subtracted | Depression | | | | |
| H0409 | H. Striatum Depression, | Human Brain, | Brain | | | pBluescript |
| | subtracted | Striatum Depression | | | | |
| H0411 | H Female Bladder, | Human Female | Bladder | | | pSport1 |
| | Adult | Adult Bladder | | | | |
| H0412 | Human umbilical vein | HUVE Cells | Umbilical vein | Cell | | pSport1 |
| | endothelial cells, IL-4 | | | Line | | |
| | induced | | | | | |
| H0413 | Human Umbilical Vein | HUVE Cells | Umbilical vein | Cell | | pSport1 |
| | Endothelial Cells, | | | Line | | |
| | uninduced | | | | | |
| H0415 | H. Ovarian Tumor, II, | Ovarian Tumor, | Ovary | | disease | pCMVSport 2.0 |
| | OV5232 | OV5232 | | | | |
| H0416 | Human Neutrophils, | Human Neutrophil - | Blood | Cell | | pBluescript |
| | Activated, re-excision | Activated | | Line | | |
| H0418 | Human Pituitary, | Human Pituitary | | | | pBluescript |
| | subtracted VII | | | | | |
| H0421 | Human Bone Marrow, | Bone Marrow | | | | pBluescript |
| | re-excision | | | | | |
| H0422 | T-Cell PHA 16 hrs | T-Cells | Blood | Cell | | pSport1 |
| | | | | Line | | |
| H0423 | T-Cell PHA 24 hrs | T-Cells | Blood | Cell | | pSport1 |
| | | | | Line | | |
| H0424 | Human Pituitary, subt | Human Pituitary | | | | pBluescript |
| | IX | | | | | |
| H0427 | Human Adipose | Human Adipose, | | | | pSport1 |
| | | left hiplipoma | | | | |
| H0428 | Human Ovary | Human Ovary | Ovary | | | pSport1 |
| | | Tumor | | | | |
| H0431 | H. Kidney Medulla, re- | Kidney medulla | Kidney | | | pBluescript |
| | excision | | | | | |
| H0435 | Ovarian Tumor 10-3-95 | Ovarian Tumor, | Ovary | | | pCMVSport 2.0 |
| | | OV350721 | | | | |
| H0436 | Resting T-Cell | T-Cells | Blood | Cell | | pSport1 |
| | Library, II | | | Line | | |
| H0438 | H. Whole Brain #2, re- | Human Whole Brain | | | | ZAP Express |
| | excision | #2 | | | | |
| H0439 | Human Eosinophils | Eosinophils | | | | pBluescript |
| H0441 | H. Kidney Cortex, | Kidney cortex | Kidney | | | pBluescript |
| | subtracted | | | | | |
| H0444 | Spleen metastatic | Spleen, Metastatic | Spleen | | disease | pSport1 |
| | melanoma | malignant | | | | |
| | | melanoma | | | | |
| H0445 | Spleen, Chronic | Human Spleen, CLL | Spleen | | disease | pSport1 |
| | lymphocytic leukemia | | | | | |
| H0450 | CD34+cells, II | CD34 positive cells | | | | pCMVSport 2.0 |
| H0455 | H. Striatum Depression, | Human Brain, | Brain | | | pBluescript |
| | subt | Striatum Depression | | | | |
| H0457 | Human Eosinophils | Human Eosinophils | | | | pSport1 |
| H0458 | CD34+ cell, I, frac II | CD34 positive cells | | | | pSport1 |
| H0459 | CD34+ cells, II, | CD34 positive cells | | | | pCMVSport 2.0 |
| | FRACTION 2 | | | | | |
| H0461 | H. Kidney Medulla, | Kidney medulla | Kidney | | | pBluescript |
| | subtracted | | | | | |
| H0462 | H. Amygdala | | Brain | | | pBluescript |
| | Depression, subtracted | | | | | |
| H0477 | Human Tonsil, Lib 3 | Human Tonsil | Tonsil | | | pSport1 |
| H0478 | Salivary Gland, Lib 2 | Human Salivary | Salivary gland | | | pSport1 |
| | | Gland | | | | |
| H0479 | Salivary Gland, Lib 3 | Human Salivary | Salivary gland | | | pSport1 |
| | | Gland | | | | |
| H0483 | Breast Cancer cell line, | Breast Cancer Cell | | | | pSport1 |
| | MDA 36 | line, MDA 36 | | | | |
| H0484 | Breast Cancer Cell line, | Breast Cancer Cell | | | | pSport1 |
| | angiogenic | line, Angiogenic, | | | | |
| | | 36T3 | | | | |
| H0485 | Hodgkin's Lymphoma I | Hodgkin's | | | disease | pCMVSport 2.0 |
| | | Lymphoma I | | | | |
| H0486 | Hodgkin's Lymphoma II | Hodgkin's | | | disease | pCMVSport 2.0 |
| | | Lymphoma II | | | | |
| H0487 | Human Tonsils, lib I | Human Tonsils | | | | pCMVSport 2.0 |
| H0488 | Human Tonsils, Lib 2 | Human Tonsils | | | | pCMVSport 2.0 |
| H0489 | Crohn's Disease | Ileum | Intestine | | disease | pSport1 |
| H0492 | HL-60, RA 4 h, | HL-60 Cells, RA | Blood | Cell | | Uni-ZAP XR |
| | Subtracted | stimulated for 4 H | | Line | | |
| H0494 | Keratinocyte | Keratinocyte | | | | pCMVSport 2.0 |
| H0497 | HEL cell line | HEL cell line | | HEL | | pSport1 |
| | | | | 92.1.7 | | |
| H0505 | Human Astrocyte | Human Astrocyte | | | | pSport1 |
| H0506 | Ulcerative Colitis | Colon | Colon | | | pSport1 |
| H0509 | Liver, Hepatoma | Human Liver, | Liver | | disease | pCMVSport 3.0 |
| | | Hepatoma, patient 8 | | | | |
| H0510 | Human Liver, normal | Human Liver, | Liver | | | pCMVSport 3.0 |
| | | normal, Patient # 8 | | | | |
| H0512 | Keratinocyte, lib 3 | Keratinocyte | | | | pCMVSport 2.0 |
| H0518 | pBMC stimulated w/ | pBMC stimulated | | | | pCMVSport 3.0 |
| | poly I/C | with poly I/C | | | | |
| H0519 | NTERA2, control | NTERA2, | | | | pCMVSport 3.0 |
| | | Teratocarcinoma | | | | |
| | | cell line | | | | |
| H0520 | NTERA2 + retinoic | NTERA2, | | | | pSport1 |
| | acid, 14 days | Teratocarcinoma | | | | |
| | | cell line | | | | |
| H0521 | Primary Dendritic Cells, | Primary Dendritic | | | | pCMVSport 3.0 |
| | lib 1 | cells | | | | |
| H0522 | Primary Dendritic | Primary Dendritic | | | | pCMVSport 3.0 |
| | cells, frac 2 | cells | | | | |
| H0525 | PCR, pBMC I/C treated | pBMC stimulated | | | | PCRII |
| | | with poly I/C | | | | |
| H0528 | Poly[I]/Poly[C] Normal | Poly[I]/Poly[C] | | | | pCMVSport 3.0 |
| | Lung Fibroblasts | Normal Lung | | | | |
| | | Fibroblasts | | | | |
| H0529 | Myeloid Progenitor Cell | TF-1 Cell Line; | | | | pCMVSport 3.0 |
| | Line | Myeloid progenitor | | | | |
| | | cell line | | | | |
| H0530 | Human Dermal | Human Dermal | | | | pSport1 |
| | Endothelial Cells, | Endothelial Cells; | | | | |
| | untreated | untreated | | | | |
| H0538 | Merkel Cells | Merkel cells | Lymph node | | | pSport1 |
| H0539 | Pancreas Islet Cell | Pancreas Islet Cell | Pancreas | | disease | pSport1 |
| | Tumor | Tumor | | | | |
| H0542 | T Cell helper I | Helper T cell | | | | pCMVSport 3.0 |
| H0543 | T cell helper II | Helper T cell | | | | pCMVSport 3.0 |
| H0544 | Human endometrial | Human endometrial | | | | pCMVSport 3.0 |
| | stromal cells | stromal cells | | | | |
| H0545 | Human endometrial | Human endometrial | | | | pCMVSport 3.0 |
| | stromal cells-treated | stromal cells-treated | | | | |
| | with progesterone | with proge | | | | |
| H0546 | Human endometrial | Human endometrial | | | | pCMVSport 3.0 |
| | stromal cells-treated | stromal cells-treated | | | | |
| | with estradiol | with estra | | | | |
| H0547 | NTERA2 | NTERA2, | | | | pSport1 |
| | teratocarcinoma cell | Teratocarcinoma | | | | |
| | line + retinoic acid (14 | cell line | | | | |
| | days) | | | | | |
| H0549 | H. Epididiymus, caput | Human | | | | Uni-ZAP XR |
| | & corpus | Epididiymus, | | | | |
| | | caput and corpus | | | | |
| H0550 | H. Epididiymus, cauda | Human | | | | Uni-ZAP XR |
| | | Epididiymus, | | | | |
| | | cauda | | | | |
| H0551 | Human Thymus Stromal | Human Thymus | | | | pCMVSport 3.0 |
| | Cells | Stromal Cells | | | | |
| H0553 | Human Placenta | Human Placenta | | | | pCMVSport 3.0 |
| H0555 | Rejected Kidney, lib 4 | Human Rejected | Kidney | | disease | pCMVSport 3.0 |
| | | Kidney | | | | |
| H0556 | Activated T- | T-Cells | Blood | Cell | | Uni-ZAP XR |
| | cell(12 h)/Thiouridine- | | | Line | | |
| | re-excision | | | | | |
| H0559 | HL-60, PMA 4 H, re- | HL-60 Cells, PMA | Blood | Cell | | Uni-ZAP XR |
| | excision | stimulated 4 H | | Line | | |
| H0560 | KMH2 | KMH2 | | | | pCMVSport 3.0 |
| H0561 | L428 | L428 | | | | pCMVSport 3.0 |
| H0563 | Human Fetal Brain, | Human Fetal Brain | | | | pCMVSport 2.0 |
| | normalized 50021F | | | | | |
| H0569 | Human Fetal Brain, | Human Fetal Brain | | | | pCMVSport 2.0 |
| | normalized CO | | | | | |
| H0570 | Human Fetal Brain, | Human Fetal Brain | | | | pCMVSport 2.0 |
| | normalized C500H | | | | | |
| H0572 | Human Fetal Brain, | Human Fetal Brain | | | | pCMVSport 2.0 |
| | normalized AC5002 | | | | | |
| H0574 | Hepatocellular Tumor; | Hepatocellular | Liver | | disease | Lambda ZAP II |
| | re-excision | Tumor | | | | |
| H0575 | Human Adult | Human Adult | Lung | | | Uni-ZAP XR |
| | Pulmonary; re-excision | Pulmonary | | | | |
| H0576 | Resting T-Cell; re- | T-Cells | Blood | Cell | | Lambda ZAP II |
| | excision | | | Line | | |
| H0580 | Dendritic cells, pooled | Pooled dendritic | | | | pCMVSport 3.0 |
| | | cells | | | | |
| H0581 | Human Bone Marrow, | Human Bone | Bone Marrow | | | pCMVSport 3.0 |
| | treated | Marrow | | | | |
| H0583 | B Cell lymphoma | B Cell Lymphoma | B Cell | | disease | pCMVSport 3.0 |
| H0584 | Activated T-cells, 24 hrs, | Activated T-Cells | Blood | Cell | | Uni-ZAP XR |
| | re-excision | | | Line | | |
| H0585 | Activated T-Cells, 12 hrs, | Activated T-Cells | Blood | Cell | | Uni-ZAP XR |
| | re-excision | | | Line | | |
| H0586 | Healing groin wound, | healing groin | groin | | disease | pCMVSport 3.0 |
| | 6.5 hours post incision | wound, 6.5 hours | | | | |
| | | post incision - 2/ | | | | |
| H0587 | Healing groin wound; | Groin-Feb. 19, 1997 | groin | | disease | pCMVSport 3.0 |
| | 7.5 hours post incision | | | | | |
| H0590 | Human adult small | Human Adult Small | Small Int. | | | Uni-ZAP XR |
| | intestine, re-excision | Intestine | | | | |
| H0591 | Human T-cell | T-Cell Lymphoma | T-Cell | | disease | Uni-ZAP XR |
| | lymphoma; re-excision | | | | | |
| H0592 | Healing groin wound - | HGS wound healing | | | disease | pCMVSport 3.0 |
| | zero hr post-incision | project; abdomen | | | | |
| | (control) | | | | | |
| H0593 | Olfactory epithelium; | Olfactory epithelium | | | | pCMVSport 3.0 |
| | nasal cavity | from roof of left | | | | |
| | | nasal cavity | | | | |
| H0594 | Human Lung Cancer; | Human Lung | Lung | | disease | Lambda ZAP II |
| | re-excision | Cancer | | | | |
| H0595 | Stomach cancer | Stomach Cancer - | | | disease | Uni-ZAP XR |
| | (human);re-excision | 5383A (human) | | | | |
| H0596 | Human Colon Cancer; | Human Colon | Colon | | | Lambda ZAP II |
| | re-excision | Cancer | | | | |
| H0597 | Human Colon; re- | Human Colon | | | | Lambda ZAP II |
| | excision | | | | | |
| H0598 | Human Stomach; re- | Human Stomach | Stomach | | | Uni-ZAP XR |
| | excision | | | | | |
| H0599 | Human Adult Heart; re- | Human Adult Heart | Heart | | | Uni-ZAP XR |
| | excision | | | | | |
| H0600 | Healing Abdomen | Abdomen | | | disease | pCMVSport 3.0 |
| | wound; 70&90 min post | | | | | |
| | incision | | | | | |
| H0601 | Healing Abdomen | Abdomen | | | disease | pCMVSport 3.0 |
| | Wound; 15 days post | | | | | |
| | incision | | | | | |
| H0602 | Healing Abdomen | Abdomen | | | disease | pCMVSport 3.0 |
| | Wound; 21&29 days | | | | | |
| | post incision | | | | | |
| H0604 | Human Pituitary, re- | Human Pituitary | | | | pBluescript |
| | excision | | | | | |
| H0606 | Human Primary Breast | Human Primary | Breast | | disease | Uni-ZAP XR |
| | Cancer; re-excision | Breast Cancer | | | | |
| H0610 | H. Leukocytes, | H. Leukocytes | | | | pCMVSport 1 |
| | normalized cot 5A | | | | | |
| H0611 | H. Leukocytes, | H. Leukocytes | | | | pCMVSport 1 |
| | normalized cot 500 B | | | | | |
| H0615 | Human Ovarian Cancer | Ovarian Cancer | Ovary | | disease | Uni-ZAP XR |
| | Reexcision | | | | | |
| H0616 | Human Testes, | Human Testes | Testis | | | Uni-ZAP XR |
| | Reexcision | | | | | |
| H0617 | Human Primary Breast | Human Primary | Breast | | disease | Uni-ZAP XR |
| | Cancer Reexcision | Breast Cancer | | | | |
| H0618 | Human Adult Testes, | Human Adult Testis | Testis | | | Uni-ZAP XR |
| | Large Inserts, | | | | | |
| | Reexcision | | | | | |
| H0619 | Fetal Heart | Human Fetal Heart | Heart | | | Uni-ZAP XR |
| H0620 | Human Fetal Kidney; | Human Fetal | Kidney | | | Uni-ZAP XR |
| | Reexcision | Kidney | | | | |
| H0622 | Human Pancreas Tumor; | Human Pancreas | Pancreas | | disease | Uni-ZAP XR |
| | Reexcision | Tumor | | | | |
| H0623 | Human Umbilical Vein; | Human Umbilical | Umbilical vein | | | Uni-ZAP XR |
| | Reexcision | Vein Endothelial | | | | |
| | | Cells | | | | |
| H0624 | 12 Week Early Stage | Twelve Week Old | Embryo | | | Uni-ZAP XR |
| | Human II; Reexcision | Early Stage Human | | | | |
| H0625 | Ku 812F Basophils Line | Ku 812F Basophils | | | | pSport1 |
| H0626 | Saos2 Cells; Untreated | Saos2 Cell Line; | | | | pSport1 |
| | | Untreated | | | | |
| H0627 | Saos2 Cells; Vitamin D3 | Saos2 Cell Line; | | | | pSport1 |
| | Treated | Vitamin D3 Treated | | | | |
| H0628 | Human Pre- | Human Pre- | | | | Uni-ZAP XR |
| | Differentiated | Differentiated | | | | |
| | Adipocytes | Adipocytes | | | | |
| H0632 | Hepatocellular Tumor; | Hepatocellular | Liver | | | Lambda ZAP II |
| | re-excision | Tumor | | | | |
| H0633 | Lung Carcinoma A549 | TNF alpha activated | | | disease | pSport1 |
| | TNF alpha activated | A549- Lung | | | | |
| | | Carcinoma | | | | |
| H0634 | Human Testes Tumor, | Human Testes | Testis | | disease | Uni-ZAP XR |
| | re-excision | Tumor | | | | |
| H0635 | Human Activated T- | Activated T-Cells | Blood | Cell | | Uni-ZAP XR |
| | Cells, re-excision | | | Line | | |
| H0637 | Dendritic Cells From | Dentritic cells from | | | | pSport1 |
| | CD34 Cells | CD34 cells | | | | |
| H0638 | CD40 activated | CD40 activated | | | | pSport1 |
| | monocyte dendritic cells | monocyte dendritic | | | | |
| | | cells | | | | |
| H0640 | Ficolled Human Stromal | Ficolled Human | | | | Other |
| | Cells, Untreated | Stromal Cells, | | | | |
| | | Untreated | | | | |
| H0641 | LPS activated derived | LPS activated | | | | pSport1 |
| | dendritic cells | monocyte derived | | | | |
| | | dendritic cells | | | | |
| H0642 | Hep G2 Cells, lambda | Hep G2 Cells | | | | Other |
| | library | | | | | |
| H0643 | Hep G2 Cells, PCR | Hep G2 Cells | | | | Other |
| | library | | | | | |
| H0644 | Human Placenta (re- | Human Placenta | Placenta | | | Uni-ZAP XR |
| | excision) | | | | | |
| H0645 | Fetal Heart, re-excision | Human Fetal Heart | Heart | | | Uni-ZAP XR |
| H0646 | Lung, Cancer (4005313 | Metastatic | | | | pSport1 |
| | A3): Invasive Poorly | squamous cell | | | | |
| | Differentiated Lung | lung carcinoma, | | | | |
| | Adenocarcinoma, | poorly di | | | | |
| H0647 | Lung, Cancer (4005163 | Invasive poorly | | | disease | pSport1 |
| | B7): Invasive, Poorly | differentiated lung | | | | |
| | Diff. Adenocarcinoma, | adenocarcinoma | | | | |
| | Metastatic | | | | | |
| H0648 | Ovary, Cancer: | Papillary Cystic | | | disease | pSport1 |
| | (4004562 B6); Papillary | neoplasm of low | | | | |
| | Serous Cystic | malignant potential | | | | |
| | Neoplasm, Low | | | | | |
| | Malignant Potential | | | | | |
| H0649 | Lung, Normal: | Normal Lung | | | | pSport1 |
| | (4005313 B1) | | | | | |
| H0650 | B-Cells | B-Cells | | | | pCMVSport 3.0 |
| H0651 | Ovary, Normal: | Normal Ovary | | | | pSport1 |
| | (9805C040R) | | | | | |
| H0652 | Lung, Normal: | Normal Lung | | | | pSport1 |
| | (4005313 B1) | | | | | |
| H0653 | Stromal Cells | Stromal Cells | | | | pSport1 |
| H0656 | B-cells (unstimulated) | B-cells | | | | pSport1 |
| | | (unstimulated) | | | | |
| H0657 | B-cells (stimulated) | B-cells (stimulated) | | | | pSport1 |
| H0658 | Ovary, Cancer | 9809C332-Poorly | Ovary & | | disease | pSport1 |
| | (9809C332): Poorly | differentiate | Fallopian | | | |
| | differentiated | | Tubes | | | |
| | adenocarcinoma | | | | | |
| H0659 | Ovary, Cancer | Grade II Papillary | Ovary | | disease | pSport1 |
| | (15395A1F): Grade II | Carcinoma, Ovary | | | | |
| | Papillary Carcinoma | | | | | |
| H0660 | Ovary, Cancer: | Poorly differentiated | | | disease | pSport1 |
| | (15799A1F) Poorly | carcinoma, ovary | | | | |
| | differentiated carcinoma | | | | | |
| H0661 | Breast, Cancer: | Breast cancer | | | disease | pSport1 |
| | (4004943 A5) | | | | | |
| H0662 | Breast, Normal: | Normal Breast - | Breast | | | pSport1 |
| | (4005522B2) | #4005522(B2) | | | | |
| H0663 | Breast, Cancer: | Breast Cancer - | Breast | | disease | pSport1 |
| | (4005522 A2) | #4005522(A2) | | | | |
| H0664 | Breast, Cancer: | Breast Cancer | Breast | | disease | pSport1 |
| | (9806C012R) | | | | | |
| H0665 | Stromal cells 3.88 | Stromal cells 3.88 | | | | pSport1 |
| H0666 | Ovary, Cancer: | Ovarian Cancer, | | | disease | pSport1 |
| | (4004332 A2) | Sample | | | | |
| | | #4004332A2 | | | | |
| H0667 | Stromal cells(HBM3.18) | Stromal cell(HBM | | | | pSport1 |
| | | 3.18) | | | | |
| H0668 | stromal cell clone 2.5 | stromal cell clone | | | | pSport1 |
| | | 2.5 | | | | |
| H0669 | Breast, Cancer: | Breast Cancer | Breast | | | pSport1 |
| | (4005385 A2) | (4005385A2) | | | | |
| H0670 | Ovary, Cancer(4004650 | Ovarian Cancer - | | | | pSport1 |
| | A3): Well- | 4004650A3 | | | | |
| | Differentiated | | | | | |
| | Micropapillary Serous | | | | | |
| | Carcinoma | | | | | |
| H0671 | Breast, Cancer: | Breast Cancer- | | | | pSport1 |
| | (9802C02OE) | Sample # | | | | |
| | | 9802C02OE | | | | |
| H0672 | Ovary, Cancer: | Ovarian | Ovary | | | pSport1 |
| | (4004576 A8) | Cancer(4004576A8) | | | | |
| H0673 | Human Prostate Cancer, | Human Prostate | Prostate | | | Uni-ZAP XR |
| | Stage B2; re-excision | Cancer, stage B2 | | | | |
| H0674 | Human Prostate Cancer, | Human Prostate | Prostate | | | Uni-ZAP XR |
| | Stage C; re-excision | Cancer, stage C | | | | |
| H0675 | Colon, Cancer: | Colon Cancer | | | | pCMVSport 3.0 |
| | (9808C064R) | 9808C064R | | | | |
| H0676 | Colon, Cancer: | Colon Cancer | | | | pCMV Sport 3.0 |
| | (9808C064R)-total RNA | 9808C064R | | | | |
| H0677 | TNFR degenerate oligo | B-Cells | | | | PCRII |
| H0682 | Serous Papillary | serous papillary | pCMVSport 3.0 | | | |
| | Adenocarcinoma | adenocarcinoma | | | | |
| | | (9606G304SPA3B) | | | | |
| H0683 | Ovarian Serous | Serous papillary | | | | pCMVSport 3.0 |
| | Papillary | adenocarcinoma, | | | | |
| | Adenocarcinoma | stage 3C (9804G01 | | | | |
| H0684 | Serous Papillary | Ovarian Cancer- | Ovaries | | | pCMVSport 3.0 |
| | Adenocarcinoma | 9810G606 | | | | |
| H0685 | Adenocarcinoma of | Adenocarcinoma of | | | | pCMVSport 3.0 |
| | Ovary, Human Cell | Ovary, Human Cell | | | | |
| | Line, # OVCAR-3 | Line, # OVCAR- | | | | |
| H0686 | Adenocarcinoma of | Adenocarcinoma of | | | | pCMVSport 3.0 |
| | Ovary, Human Cell Line | Ovary, Human Cell | | | | |
| | | Line, # SW-626 | | | | |
| H0687 | Human normal | Human normal | Ovary | | | pCMVSport 3.0 |
| | | ovary | | | | |
| | ovary(#9610G215) | (#9610G215) | | | | |
| H0688 | Human Ovarian | Human ovarian | | | | pCMVSport 3.0 |
| | Cancer(#9807G017) | cancer | | | | |
| | | (#9807G017), | | | | |
| | | mRNA from Maura | | | | |
| | | Ru | | | | |
| H0689 | Ovarian Cancer | Ovarian Cancer, | | | | pCMVSport 3.0 |
| | | #9806G019 | | | | |
| H0690 | Ovarian Cancer, | Ovarian Cancer, | | | | pCMVSport 3.0 |
| | #9702G001 | #9702G001 | | | | |
| H0691 | Normal Ovary, | normal ovary, | | | | pCMVSport 3.0 |
| | #9710G208 | #9710G208 | | | | |
| H0692 | BLyS Receptor from | B Cell Lymphoma | B Cell | | | pCMVSport 3.0 |
| | Expression Cloning | | | | | |
| H0693 | Normal Prostate | Normal Prostate | | | | pCMVSport 3.0 |
| | #ODQ3958EN | Tissue | | | | |
| | | #ODQ3958EN | | | | |
| H0694 | Prostate gland | Prostate gland, | prostate gland | | | pCMVSport 3.0 |
| | adenocarcinoma | adenocarcinoma, | | | | |
| | | mod/diff, gleason | | | | |
| H0695 | mononucleocytes from | mononucleocytes | | | | pCMVSport 3.0 |
| | patient | from patient at | | | | |
| | | Shady Grove | | | | |
| | | Hospital | | | | |
| H0771 | Esophageal cancer | Esophageal cancer | esophagous | | disease | pCMVSport6 |
| N0006 | Human Fetal Brain | Human Fetal Brain | | | | |
| S0001 | Brain frontal cortex | Brain frontal cortex | Brain | | | Lambda ZAP II |
| S0002 | Monocyte activated | Monocyte-activated | blood | Cell | | Uni-ZAP XR |
| | | | | Line | | |
| S0003 | Human Osteoclastoma | Osteoclastoma | bone. | | disease | Uni-ZAP XR |
| S0006 | Neuroblastoma | Human Neural | | | disease | pCDNA |
| | | Blastoma | | | | |
| S0007 | Early Stage Human | Human Fetal Brain | | | | Uni-ZAP XR |
| | Brain | | | | | |
| S0010 | Human Amygdala | Amygdala | | | | Uni-ZAP XR |
| S0011 | STROMAL - | Osteoclastoma | bone | | disease | Uni-ZAP XR |
| | OSTEOCLASTOMA | | | | | |
| S0015 | Kidney medulla | Kidney medulla | Kidney | | | Uni-ZAP XR |
| S0016 | Kidney Pyramids | Kidney pyramids | Kidney | | | Uni-ZAP XR |
| S0022 | Human Osteoclastoma | Osteoclastoma | | | | Uni-ZAP XR |
| | Stromal Cells - | Stromal Cells | | | | |
| | unamplified | | | | | |
| S0026 | Stromal cell TF274 | stromal cell | Bone marrow | Cell | | Uni-ZAP XR |
| | | | | Line | | |
| S0027 | Smooth muscle, serum | Smooth muscle | Pulmonary | Cell | | Uni-ZAP XR |
| | treated | | artery | Line | | |
| S0028 | Smooth muscle, control | Smooth muscle | Pulmonary | Cell | | Uni-ZAP XR |
| | | | artery | Line | | |
| S0030 | Brain pons | Brain Pons | Brain | | | Uni-ZAP XR |
| S0031 | Spinal cord | Spinal cord | spinal cord | | | Uni-ZAP XR |
| S0032 | Smooth muscle-ILb | Smooth muscle | Pulmonary | Cell | | Uni-ZAP XR |
| | induced | | artery | Line | | |
| S0036 | Human Substantia Nigra | Human Substantia | | | | Uni-ZAP XR |
| | | Nigra | | | | |
| S0037 | Smooth muscle, IL1b | Smooth muscle | Pulmanary | Cell | | Uni-ZAP XR |
| | induced | | artery | Line | | |
| S0038 | Human Whole Brain #2 - | Human Whole Brain | | | | ZAP Express |
| | Oligo dT > 1.5 Kb | #2 | | | | |
| S0040 | Adipocytes | Human Adipocytes | | | | Uni-ZAP XR |
| | | from Osteoclastoma | | | | |
| S0044 | Prostate BPH | prostate BPH | Prostate | | disease | Uni-ZAP XR |
| S0045 | Endothelial cells-control | Endothelial cell | endothelial | Cell | | Uni-ZAP XR |
| | | | cell-lung | Line | | |
| S0046 | Endothelial-induced | Endothelial cell | endothelial | Cell | | Uni-ZAP XR |
| | | | cell-lung | Line | | |
| S0049 | Human Brain, Striatum | Human Brain, | | | | Uni-ZAP XR |
| | | Striatum | | | | |
| S0050 | Human Frontal Cortex, | Human Frontal | | | disease | Uni-ZAP XR |
| | Schizophrenia | Cortex, | | | | |
| | | Schizophrenia | | | | |
| S0051 | Human Hypothalamus, | Human | | | disease | Uni-ZAP XR |
| | Schizophrenia | Hypothalamus, | | | | |
| | | Schizophrenia | | | | |
| S0052 | neutrophils control | human neutrophils | blood | Cell | | Uni-ZAP XR |
| | | | | Line | | |
| S0053 | Neutrophils IL-1 and | human neutrophil | blood | Cell | | Uni-ZAP XR |
| | LPS induced | induced | | Line | | |
| S0106 | striatum depression | | BRAIN | | disease | Uni-ZAP XR |
| S0110 | Brain Amygdala | | Brain | | disease | Uni-ZAP XR |
| | Depression | | | | | |
| S0112 | Hypothalamus | | Brain | | | Uni-ZAP XR |
| S0114 | Anergic T-cell | Anergic T-cell | | Cell | | Uni-ZAP XR |
| | | | | Line | | |
| S0116 | Bone marrow | Bone marrow | Bone marrow | | | Uni-ZAP XR |
| S0122 | Osteoclastoma- | Osteoclastoma | bone | | disease | pBluescript |
| | normalized A | | | | | |
| S0126 | Osteoblasts | Osteoblasts | Knee | Cell | | Uni-ZAP XR |
| | | | | Line | | |
| S0132 | Epithelial-TNFa and | Airway Epithelial | | | | Uni-ZAP XR |
| | INF induced | | | | | |
| S0134 | Apoptotic T-cell | apoptotic cells | | Cell | | Uni-ZAP XR |
| | | | | Line | | |
| S0142 | Macrophage-oxLDL | macrophage- | blood | Cell | | Uni-ZAP XR |
| | | oxidized LDL | | Line | | |
| | | treated | | | | |
| S0144 | Macrophage (GM-CSF | Macrophage (GM- | | | | Uni-ZAP XR |
| | treated) | CSF treated) | | | | |
| S0146 | prostate-edited | prostate BPH | Prostate | | | Uni-ZAP XR |
| S0148 | Normal Prostate | Prostate | prostate | | | Uni-ZAP XR |
| S0150 | LNCAP prostate cell | LNCAP Cell Line | Prostate | Cell | | Uni-ZAP XR |
| | line | | | Line | | |
| S0152 | PC3 Prostate cell line | PC3 prostate | | | | Uni-ZAP XR |
| | | cell line | | | | |
| S0180 | Bone Marrow Stroma, | Bone Marrow | | | disease | Uni-ZAP XR |
| | TNF&LPS induced | Stroma, TNF & LPS | | | | |
| | | induced | | | | |
| S0182 | Human B Cell 8866 | Human B-Cell 8866 | | | | Uni-ZAP XR |
| S0188 | Prostate, BPH, Lib 2 | Human Prostate | | | disease | pSport1 |
| | | BPH | | | | |
| S0190 | Prostate BPH, Lib 2, | Human Prostate | | | | pSport1 |
| | subtracted | BPH | | | | |
| S0192 | Synovial Fibroblasts | Synovial Fibroblasts | | | | pSport1 |
| | (control) | | | | | |
| S0194 | Synovial hypoxia | Synovial Fibroblasts | | | | pSport1 |
| S0196 | Synovial IL-1/TNF | Synovial Fibroblasts | | | | pSport1 |
| | stimulated | | | | | |
| S0206 | Smooth Muscle- | Smooth muscle | Pulmonary | Cell | | pBluescript |
| | HASTE normalized | | artery | Line | | |
| S0210 | Mesangial cell, frac 2 | Mesangial cell | | | | pSport1 |
| S0212 | Bone Marrow Stromal | Bone Marrow | | | | pSport1 |
| | Cell, untreated | Stromal Cell, | | | | |
| | | untreated | | | | |
| S0214 | Human Osteoclastoma, | Osteoclastoma | bone | | disease | Uni-ZAP XR |
| | re-excision | | | | | |
| S0216 | Neutrophils IL-1 and | human neutrophil | blood | Cell | | Uni-ZAP XR |
| | LPS induced | induced | | Line | | |
| S0218 | Apoptotic T-cell, re- | apoptotic cells | | Cell | | Uni-ZAP XR |
| | excision | | | Line | | |
| S0220 | H. hypothalamus, frac | Hypothalamus | Brain | | | ZAP Express |
| | A; re-excision | | | | | |
| S0222 | H. Frontal cortex, | H. Brain, Frontal | Brain | | disease | Uni-ZAP XR |
| | epileptic; re-excision | Cortex, Epileptic | | | | |
| S0242 | Synovial Fibroblasts | Synovial Fibroblasts | | | | pSport1 |
| | (Il1/TNF), subt | | | | | |
| S0250 | Human Osteoblasts II | Human Osteoblasts | Femur | | disease | pCMVSport 2.0 |
| S0260 | Spinal Cord, re-excision | Spinal cord | spinal cord | | | Uni-ZAP XR |
| S0262 | PYCS | Human Antrum | | | | PCRII |
| | | (PY_CS) | | | | |
| S0276 | Synovial hypoxia-RSF | Synovial fibroblasts | Synovial tissue | | | pSport1 |
| | subtracted | (rheumatoid) | | | | |
| S0278 | H Macrophage (GM- | Macrophage (GM- | | | | Uni-ZAP XR |
| | CSF treated), re- | CSF treated) | | | | |
| | excision | | | | | |
| S0280 | Human Adipose Tissue, | Human Adipose | | | | Uni-ZAP XR |
| | re-excision | Tissue | | | | |
| S0282 | Brain Frontal Cortex, re- | Brain frontal cortex | Brain | | | Lambda ZAP II |
| | excision | | | | | |
| S0284 | 7TMCTT (Testis) | 7TMCTP (Placenta) | Testis | | | PCRII |
| S0286 | 7TMCTP (Placenta) | H7MCTP | Placenta | | | PCRII |
| | | (PLACENTA) | | | | |
| S0288 | 7TMCTK (Kidney) | 7TMCTK (Kidney) | Brain | | | PCRII |
| S0290 | H7TMCTB (Brain) | 7TMCTB (Brain) | Kidney | | | PCRII |
| S0292 | Osteoarthritis (OA-4) | Human | Bone | | disease | pSport1 |
| | | Osteoarthritic | | | | |
| | | Cartilage | | | | |
| S0298 | Bone marrow stroma, | Bone marrow | Bone marrow | | | pSport1 |
| | treated | stroma, treated SB | | | | |
| S0300 | Frontal lobe, dementia; | Frontal Lobe | Brain | | | Uni-ZAP XR |
| | re-excision | dementia/ | | | | |
| | | Alzheimer's | | | | |
| S0302 | Adrenergic 7TMR | Human Brain whole | whole brain | | | PCRII |
| S0306 | Larynx normal #10 261-273 | Larynx normal | | | | pSport1 |
| S0310 | Normal trachea | Normal trachea | | | | pSport1 |
| S0312 | Human osteoarthritic; | Human | | | disease | pSport1 |
| | fraction II | osteoarthritic | | | | |
| | | cartilage | | | | |
| S0314 | Human osteoarthritis; | Human | | | disease | pSport1 |
| | fraction I | osteoarthritic | | | | |
| | | cartilage | | | | |
| S0316 | Human Normal | Human Normal | | | | pSport1 |
| | Cartilage, Fraction I | Cartilage | | | | |
| S0318 | Human Normal | Human Normal | | | | pSport1 |
| | Cartilage Fraction II | Cartilage | | | | |
| S0328 | Palate carcinoma | Palate carcinoma | Uvula | | disease | pSport1 |
| S0330 | Palate normal | Palate normal | Uvula | | | pSport1 |
| S0334 | Human Normal | Human Normal | | | | pSport1 |
| | Cartilage Fraction III | Cartilage | | | | |
| S0336 | Human Normal | Human Normal | | | | pSport1 |
| | Cartilage Fraction IV | Cartilage | | | | |
| S0340 | Human Osteoarthritic | Human | | | disease | pSport1 |
| | Cartilage Fraction IV | osteoarthritic | | | | |
| | | cartilage | | | | |
| S0342 | Adipocytes; re-excision | Human Adipocytes | | | | Uni-ZAP XR |
| | | from Osteoclastoma | | | | |
| S0344 | Macrophage-oxLDL; re- | macrophage- | blood | Cell | | Uni-ZAP XR |
| | excision | oxidized LDL | | Line | | |
| | | treated | | | | |
| S0346 | Human Amygdala; re- | Amygdala | | | | Uni-ZAP XR |
| | excision | | | | | |
| S0348 | Cheek Carcinoma | Cheek Carcinoma | | | disease | pSport1 |
| S0350 | Pharynx Carcinoma | Pharynx carcinoma | Hypopharynx | | disease | pSport1 |
| S0352 | Larynx Carcinoma | Larynx carcinoma | | | disease | pSport1 |
| S0354 | Colon Normal II | Colon Normal | Colon | | | pSport1 |
| S0356 | Colon Carcinoma | Colon Carcinoma | Colon | | disease | pSport1 |
| S0358 | Colon Normal III | Colon Normal | Colon | | | pSport1 |
| S0360 | Colon Tumor II | Colon Tumor | Colon | | disease | pSport1 |
| S0362 | Human Gastrocnemius | Gastrocnemius | | | | pSport1 |
| | | muscle | | | | |
| S0364 | Human Quadriceps | Quadriceps muscle | | | | pSport1 |
| S0366 | Human Soleus | Soleus Muscle | | | | pSport1 |
| S0368 | Human Pancreatic | Islets of Langerhans | | | | pSport1 |
| | Langerhans | | | | | |
| S0370 | Larynx carcinoma II | Larynx carcinoma | | | disease | pSport1 |
| S0374 | Normal colon | Normal colon | | | | pSport1 |
| S0376 | Colon Tumor | Colon Tumor | | | disease | pSport1 |
| S0378 | Pancreas normal PCA4 | Pancreas Normal | | | | pSport1 |
| | No | PCA4 No | | | | |
| S0380 | Pancreas Tumor PCA4 | Pancreas Tumor | | | disease | pSport1 |
| | Tumor | PCA4 Tumor | | | | |
| S0382 | Larynx carcinoma IV | Larynx carcinoma | | | disease | pSport1 |
| S0384 | Tongue carcinoma | Tongue carcinoma | | | disease | pSport1 |
| S0386 | Human Whole Brain, re- | Whole brain | Brain | | | ZAP Express |
| | excision | | | | | |
| S0388 | Human Hypothalamus, | Human | | | disease | Uni-ZAP XR |
| | schizophrenia, re- | Hypothalamus, | | | | |
| | excision | Schizophrenia | | | | |
| S0390 | Smooth muscle, control; | Smooth muscle | Pulmonary | Cell | | Uni-ZAP XR |
| | re-excision | | artery | Line | | |
| S0392 | Salivary Gland | Salivary gland; | | | | pSport1 |
| | | normal | | | | |
| S0402 | Adrenal Gland, normal | Adrenal gland; | | | | pSport1 |
| | | normal | | | | |
| S0404 | Rectum normal | Rectum, normal | | | | pSport1 |
| S0406 | Rectum tumor | Rectum tumor | | | | pSport1 |
| S0408 | Colon, normal | Colon, normal | | | | pSport1 |
| S0410 | Colon, tumor | Colon, tumor | | | | pSport1 |
| S0412 | Temporal cortex- | Temporal cortex, | | | disease | Other |
| | Alzheimer; subtracted | Alzheimer | | | | |
| S0418 | CHME Cell Line; | CHME Cell Line; | | | | pCMVSport 3.0 |
| | treated 5 hrs | treated | | | | |
| S0420 | CHME Cell Line, | CHME Cell line, | | | | pSport1 |
| | untreated | untreated | | | | |
| S0422 | Mo7e Cell Line GM- | Mo7e Cell Line | | | | pCMVSport 3.0 |
| | CSF treated (1 ng/ml) | GM-CSF treated | | | | |
| | | (1 ng/ml) | | | | |
| S0424 | TF-1 Cell Line GM-CSF | TF-1 Cell Line GM- | | | | pSport1 |
| | Treated | CSF Treated | | | | |
| S0426 | Monocyte activated; re- | Monocyte-activated | blood | Cell | | Uni-ZAP XR |
| | excision | | | Line | | |
| S0428 | Neutrophils control; re- | human neutrophils | blood | Cell | | Uni-ZAP XR |
| | excision | | | Line | | |
| S0430 | Aryepiglottis Normal | Aryepiglottis | | | | pSport1 |
| | | Normal | | | | |
| S0432 | Sinus piniformis Tumor | Sinus piniformis | | | | pSport1 |
| | | Tumor | | | | |
| S0434 | Stomach Normal | Stomach Normal | | | disease | pSport1 |
| S0436 | Stomach Tumor | Stomach Tumor | | | disease | pSport1 |
| S0438 | Liver Normal Met5 No | Liver Normal | | | | pSport1 |
| | | Met5No | | | | |
| S0440 | Liver Tumor Met 5 Tu | Liver Tumor | | | | pSport1 |
| S0442 | Colon Normal | Colon Normal | | | | pSport1 |
| S0444 | Colon Tumor | Colon Tumor | | | disease | pSport1 |
| S0446 | Tongue Tumor | Tongue Tumor | | | | pSport1 |
| S0448 | Larynx Normal | Larynx Normal | | | | pSport1 |
| S0450 | Larynx Tumor | Larynx Tumor | | | | pSport1 |
| S0452 | Thymus | Thymus | | | | pSport1 |
| S0454 | Placenta | Placenta | Placenta | | | pSport1 |
| S0456 | Tongue Normal | Tongue Normal | | | | pSport1 |
| S0460 | Thyroid Tumor | Thyroid Tumor | | | | pSport1 |
| S0464 | Larynx Normal | Larynx Normal | | | | pSport1 |
| S0466 | Larynx Tumor | Larynx Tumor | | | disease | pSport1 |
| S0468 | Ea.hy.926 cell line | Ea.hy.926 cell line | | | | pSport1 |
| S0474 | Human blood platelets | Platelets | Blood platelets | | | Other |
| S3012 | Smooth Muscle Serum | Smooth muscle | Pulmonary | Cell | | pBluescript |
| | Treated, Norm | | artery | Line | | |
| S3014 | Smooth muscle, serum | Smooth muscle | Pulmonary | Cell | | pBluescript |
| | induced, re-exc | | artery | Line | | |
| S6014 | H. hypothalamus, frac A | Hypothalamus | Brain | | | ZAP Express |
| S6016 | H. Frontal Cortex, | H. Brain, Frontal | Brain | | disease | Uni-ZAP XR |
| | Epileptic | Cortex, Epileptic | | | | |
| S6022 | H. Adipose Tissue | Human Adipose | | | | Uni-ZAP XR |
| | | Tissue | | | | |
| S6024 | Alzheimers, spongy | Alzheimer's/Spongy | Brain | | disease | Uni-ZAP XR |
| | change | change | | | | |
| S6028 | Human Manic | Human Manic | Brain | | disease | Uni-ZAP XR |
| | Depression Tissue | depression tissue | | | | |
| T0002 | Activated T-cells | Activated T-Cell, | Blood | Cell | | pBluescript SK− |
| | | PBL fraction | | Line | | |
| T0003 | Human Fetal Lung | Human Fetal Lung | | | | pBluescript SK− |
| T0004 | Human White Fat | Human White Fat | | | | pBluescript SK− |
| T0006 | Human Pineal Gland | Human Pineal | | | | pBluescript SK− |
| | | Gland | | | | |
| T0008 | Colorectal Tumor | Colorectal Tumor | | | disease | pBluescript SK− |
| T0010 | Human Infant Brain | Human Infant Brain | | | | Other |
| T0023 | Human Pancreatic | Human Pancreatic | | | disease | pBluescript SK− |
| | Carcinoma | Carcinoma | | | | |
| T0039 | HSA 172 Cells | Human HSA172 | | | | pBluescript SK− |
| | | cell line | | | | |
| T0040 | HSC172 cells | SA172 Cells | | | | pBluescript SK− |
| T0041 | Jurkat T-cell G1 phase | Jurkat T-cell | | | | pBluescript SK− |
| T0042 | Jurkat T-Cell, S phase | Jurkat T-Cell Line | | | | pBluescript SK− |
| T0047 | T lymphocytes >70 | T lymphocytes >70 | | | | pBluescript SK− |
| T0048 | Human Aortic | Human Aortic | | | | pBluescript SK− |
| | Endothelium | Endothelium | | | | |
| T0049 | Aorta endothelial cells + TNF-a | Aorta endothelial | | | | pBluescript SK− |
| | | cells | | | | |
| T0060 | Human White Adipose | Human White Fat | | | | pBluescript SK− |
| T0067 | Human Thyroid | Human Thyroid | | | | pBluescript SK− |
| T0069 | Human Uterus, normal | Human Uterus, | | | | pBluescript SK− |
| | | normal | | | | |
| T0070 | Human Adrenal Gland | Human Adrenal | | | | pBluescript SK− |
| | | Gland | | | | |
| T0082 | Human Adult Retina | Human Adult Retina | | | | pBluescript SK− |
| T0103 | Human colon carcinoma | | | | | pBluescript SK− |
| | (HCC) cell line | | | | | |
| T0114 | Human (Caco-2) cell | | | | | pBluescript SK− |
| | line, adenocarcinoma, | | | | | |
| | colon, remake | | | | | |
| L0002 | Atrium cDNA library | | | | | |
| | Human heart | | | | | |
| L0005 | Clontech human aorta | | | | | |
| | polyA+ mRNA (#6572) | | | | | |
| L0021 | Human adult (K. Okubo) | | | | | |
| L0022 | Human adult lung 3″ | | | | | |
| | directed MboI cDNA | | | | | |
| L0040 | Human colon mucosa | | | | | |
| L0041 | Human epidermal | | | | | |
| | keratinocyte | | | | | |
| L0055 | Human promyelocyte | | | | | |
| L0065 | Liver HepG2 cell line. | | | | | |
| L0105 | Human aorta polyA+ | aorta | | | | |
| | (TFujiwara) | | | | | |
| L0141 | Human pancreatic islet | pancreatic islet | | | | |
| | cell | | | | | |
| L0142 | Human placenta cDNA | placenta | | | | |
| | (TFujiwara) | | | | | |
| L0143 | Human placenta polyA+ | placenta | | | | |
| | (TFujiwara) | | | | | |
| L0163 | Human heart cDNA | | heart | | | |
| | (YNakamura) | | | | | |
| L0351 | Infant brain, Bento | | | | | BA, M13-derived |
| | Soares | | | | | |
| L0352 | Normalized infant brain, | | | | | BA, M13-derived |
| | Bento Soares | | | | | |
| L0361 | Stratagene ovary | | ovary | | | Bluescript SK |
| | (#937217) | | | | | |
| L0362 | Stratagene ovarian | | | | | Bluescript SK− |
| | cancer (#937219) | | | | | |
| L0363 | NCI_CGAP_GC2 | germ cell tumor | | | | Bluescript SK− |
| L0364 | NCI_CGAP_GC5 | germ cell tumor | | | | Bluescript SK− |
| L0366 | Stratagene schizo brain | schizophrenic brain | | | | Bluescript SK− |
| | S11 | S-11 frontal lobe | | | | |
| L0367 | NCI_CGAP_Sch1 | Schwannoma tumor | | | | Bluescript SK− |
| L0368 | NCI_CGAP_SS1 | synovial sarcoma | | | | Bluescript SK− |
| L0369 | NCI_CGAP_AA1 | adrenal adenoma | adrenal gland | | | Bluescript SK− |
| L0371 | NCI_CGAP_Br3 | breast tumor | breast | | | Bluescript SK− |
| L0372 | NCI_CGAP_Co12 | colon tumor | colon | | | Bluescript SK− |
| L0373 | NCI_CGAP_Co11 | tumor | colon | | | Bluescript SK− |
| L0374 | NCI_CGAP_Co2 | tumor | colon | | | Bluescript SK− |
| L0375 | NCI_CGAP_Kid6 | kidney tumor | kidney | | | Bluescript SK− |
| L0376 | NCI_CGAP_Lar1 | larynx | larynx | | | Bluescript SK− |
| L0378 | NCI_CGAP_Lu1 | lung tumor | lung | | | Bluescript SK− |
| L0379 | NCI_CGAP_Lym3 | lymphoma | lymph node | | | Bluescript SK− |
| L0381 | NCI_CGAP_HN4 | squamous cell | pharynx | | | Bluescript SK− |
| | | carcinoma | | | | |
| L0382 | NCI_CGAP_Pr25 | epithelium | prostate | | | Bluescript SK− |
| | | (cell line) | | | | |
| L0383 | NCI_CGAP_Pr24 | invasive tumor (cell | prostate | | | Bluescript SK− |
| | | line) | | | | |
| L0384 | NCI_CGAP_Pr23 | prostate tumor | prostate | | | Bluescript SK− |
| L0386 | NCI_CGAP_HN3 | squamous cell | tongue | | | Bluescript SK− |
| | | carcinoma from | | | | |
| | | base of tongue | | | | |
| L0387 | NCI_CGAP_GCB0 | germinal center B- | tonsil | | | Bluescript SK− |
| | | cells | | | | |
| L0388 | NCI_CGAP_HN6 | normal gingiva (cell | | | | Bluescript SK− |
| | | line from | | | | |
| | | immortalized | | | | |
| | | keratinocyte | | | | |
| L0393 | B, Human Liver tissue | | | | | gt11 |
| L0411 | 1-NIB | | | | | Lafmid BA |
| L0415 | b4HB3MA Cot8-HAP- | | | | | Lafmid BA |
| | Ft | | | | | |
| L0418 | b4HB3MA-Cot109 + 10- | | | | | Lafmid BA |
| | Bio | | | | | |
| L0435 | Infant brain, LLNL | | | | | lafmid BA |
| | array of Dr. M. Soares | | | | | |
| | 1NIB | | | | | |
| L0438 | normalized infant brain | total brain | brain | | | lafmid BA |
| | cDNA | | | | | |
| L0439 | Soares infant brain | | whole brain | | | Lafmid BA |
| | 1NIB | | | | | |
| L0446 | N4HB3MK | | | | | Lafmid BK |
| L0455 | Human retina cDNA | retina | eye | | | lambda gt10 |
| | randomly primed sub- | | | | | |
| | library | | | | | |
| L0456 | Human retina cDNA | retina | eye | | | lambda gt10 |
| | Tsp509I-cleaved sub- | | | | | |
| | library | | | | | |
| L0471 | Human fetal heart, | | | | | Lambda ZAP |
| | Lambda ZAP Express | | | | | Express |
| L0475 | KG1-a Lambda Zap | | | KG1-a | | Lambda Zap |
| | Express cDNA library | | | | | Express |
| | | | | | | (Stratagene) |
| L0483 | Human pancreatic islet | | | | | Lambda ZAPII |
| L0485 | STRATAGENE Human | skeletal muscle | leg muscle | | | Lambda ZAPII |
| | skeletal muscle cDNA | | | | | |
| | library, cat. #936215. | | | | | |
| L0493 | NCI_CGAP_Ov26 | papillary serous | ovary | | | pAMP1 |
| | | carcinoma | | | | |
| L0499 | NCI_CGAP_HSC2 | stem cell 34+/38+ | bone marrow | | | pAMP1 |
| L0500 | NCI_CGAP_Brn20 | oligodendroglioma | brain | | | pAMP1 |
| L0502 | NCI_CGAP_Br15 | adenocarcinoma | breast | | | pAMP1 |
| L0504 | NCI_CGAP_Br13 | breast carcinoma in | breast | | | pAMP1 |
| | | situ | | | | |
| L0506 | NCI_CGAP_Br16 | lobular carcinoma in | breast | | | pAMP1 |
| | | situ | | | | |
| L0509 | NCI_CGAP_Lu26 | invasive | lung | | | pAMP1 |
| | | adenocarcinoma | | | | |
| L0510 | NCI_CGAP_Ov33 | borderline ovarian | ovary | | | pAMP1 |
| | | carcinoma | | | | |
| L0511 | NCI_CGAP_Ov34 | borderline ovarian | ovary | | | pAMP1 |
| | | carcinoma | | | | |
| L0512 | NCI_CGAP_Ov36 | borderline ovarian | ovary | | | pAMP1 |
| | | carcinoma | | | | |
| L0515 | NCI_CGAP_Ov32 | papillary serous | ovary | | | pAMP1 |
| | | carcinoma | | | | |
| L0517 | NCI_CGAP_Pr1 | | | | | pAMP10 |
| L0518 | NCI_CGAP_Pr2 | | | | | pAMP10 |
| L0519 | NCI_CGAP_Pr3 | | | | | pAMP10 |
| L0520 | NCI_CGAP_Alv1 | alveolar | | | | pAMP10 |
| | | rhabdomyosarcoma | | | | |
| L0521 | NCI_CGAP_Ew1 | Ewing's sarcoma | | | | pAMP10 |
| L0522 | NCI_CGAP_Kid1 | kidney | | | | pAMP10 |
| L0523 | NCI_CGAP_Lip2 | liposarcoma | | | | pAMP10 |
| L0526 | NCI_CGAP_Pr12 | metastatic prostate | | | | pAMP10 |
| | | bone lesion | | | | |
| L0527 | NCI_CGAP_Ov2 | ovary | | | | pAMP10 |
| L0528 | NCI_CGAP_Pr5 | prostate | | | | pAMP10 |
| L0529 | NCI_CGAP_Pr6 | prostate | | | | pAMP10 |
| L0530 | NCI_CGAP_Pr8 | prostate | | | | pAMP10 |
| L0531 | NCI_CGAP_Pr20 | prostate metastasis, | | | | pAMP10 |
| | | liver | | | | |
| L0532 | NCI_CGAP_Thy1 | thyroid | | | | pAMP10 |
| L0540 | NCI_CGAP_Pr10 | invasive prostate | prostate | | | pAMP10 |
| | | tumor | | | | |
| L0541 | NCI_CGAP_Pr7 | low-grade prostatic | prostate | | | pAMP10 |
| | | neoplasia | | | | |
| L0543 | NCI_CGAP_Pr9 | normal prostatic | prostate | | | pAMP10 |
| | | epithelial cells | | | | |
| L0544 | NCI_CGAP_Pr4 | prostatic | prostate | | | pAMP10 |
| | | intraepithelial | | | | |
| | | neoplasia - high | | | | |
| | | grade | | | | |
| L0545 | NCI_CGAP_Pr4.1 | prostatic | prostate | | | pAMP10 |
| | | intraepithelial | | | | |
| | | neoplasia - high | | | | |
| | | grade | | | | |
| L0547 | NCI_CGAP_Pr16 | tumor | prostate | | | pAMP10 |
| L0553 | NCI_CGAP_Co22 | colonic | colon | | | pAMP10 |
| | | adenocarcinoma | | | | |
| L0555 | NCI_CGAP_Lu34 | large cell carcinoma | lung | | | pAMP10 |
| L0558 | NCI_CGAP_Ov40 | endometrioid | ovary | | | pAMP10 |
| | | ovarian | | | | |
| | | metastasis | | | | |
| L0559 | NCI_CGAP_Ov39 | papillary serous | ovary | | | pAMP10 |
| | | ovarian metastasis | | | | |
| L0560 | NCI_CGAP_HN12 | moderate to poorly | tongue | | | pAMP10 |
| | | differentiated | | | | |
| | | invasive carcinoma | | | | |
| L0561 | NCI_CGAP_HN11 | normal squamous | tongue | | | pAMP10 |
| | | epithelium | | | | |
| L0564 | Jia bone marrow stroma | bone marrow stroma | | | | pBluescript |
| L0565 | Normal Human | Bone | Hip | | | pBluescript |
| | Trabecular Bone Cells | | | | | |
| L0581 | Stratagene liver | | liver | | | pBluescript SK |
| | (#937224) | | | | | |
| L0586 | HTCDL1 | | | | | pBluescript SK(−) |
| L0588 | Stratagene endothelial | | | | | pBluescript SK− |
| | cell 937223 | | | | | |
| L0589 | Stratagene fetal retina | | | | | pBluescript SK− |
| | 937202 | | | | | |
| L0591 | Stratagene HeLa cell s3 | | | | | pBluescript SK− |
| | 937216 | | | | | |
| L0592 | Stratagene hNT neuron | | | | | pBluescript SK− |
| | (#937233) | | | | | |
| L0593 | Stratagene | | | | | pBluescript SK− |
| | neuroepithelium | | | | | |
| | (#937231) | | | | | |
| L0595 | Stratagene NT2 | neuroepithelial cells | brain | | | pBluescript SK− |
| | neuronal precursor | | | | | |
| | 937230 | | | | | |
| L0596 | Stratagene colon | | colon | | | pBluescript SK− |
| | (#937204) | | | | | |
| L0597 | Stratagene corneal | | cornea | | | pBluescript SK− |
| | stroma (#937222) | | | | | |
| L0598 | Morton Fetal Cochlea | cochlea | ear | | | pBluescript SK− |
| L0599 | Stratagene lung | | lung | | | pBluescript SK− |
| | (#937210) | | | | | |
| L0600 | Weizmann Olfactory | olfactory epithelium | nose | | | pBluescript SK− |
| | Epithelium | | | | | |
| L0601 | Stratagene pancreas | | pancreas | | | pBluescript SK− |
| | (#937208) | | | | | |
| L0602 | Pancreatic Islet | pancreatic islet | pancreas | | | pBluescript SK− |
| L0603 | Stratagene placenta | | placenta | | | pBluescript SK− |
| | (#937225) | | | | | |
| L0604 | Stratagene muscle | muscle | skeletal muscle | | | pBluescript SK− |
| | 937209 | | | | | |
| L0605 | Stratagene fetal spleen | fetal spleen | spleen | | | pBluescript SK− |
| | (#937205) | | | | | |
| L0606 | NCI_CGAP_Lym5 | follicular lymphoma | lymph node | | | pBluescript SK− |
| L0607 | NCI_CGAP_Lym6 | mantle cell | lymph node | | | pBluescript SK− |
| | | lymphoma | | | | |
| L0608 | Stratagene lung | lung carcinoma | lung | NCI- | | pBluescript SK− |
| | carcinoma 937218 | | | H69 | | |
| L0609 | Schiller astrocytoma | astrocytoma | brain | | | pBluescript SK− |
| | | | | | | (Stratagene) |
| L0611 | Schiller meningioma | meningioma | brain | | | pBluescript SK− |
| | | | | | | (Stratagene) |
| L0615 | 22 week old human fetal | | | | | pBluescriptII SK(−) |
| | liver cDNA library | | | | | |
| L0623 | HM3 | pectoral muscle | | | | pcDNAII |
| | | (after mastectomy) | | | | (Invitrogen) |
| L0626 | NCI_CGAP_GC1 | bulk germ cell | | | | pCMV-SPORT2 |
| | | seminoma | | | | |
| L0627 | NCI_CGAP_Co1 | bulk tumor | colon | | | pCMV-SPORT2 |
| L0629 | NCI_CGAP_Mel3 | metastatic | bowel (skin | | | pCMV-SPORT4 |
| | | melanoma to | primary) | | | |
| | | bowel | | | | |
| L0631 | NCI_CGAP_Br7 | | breast | | | pCMV-SPORT4 |
| L0634 | NCI_CGAP_Ov8 | serous | ovary | | | pCMV-SPORT4 |
| | | adenocarcinoma | | | | |
| L0635 | NCI_CGAP_PNS1 | dorsal root ganglion | peripheral | | | pCMV-SPORT4 |
| | | | nervous system | | | |
| L0636 | NCI_CGAP_Pit1 | four pooled pituitary | brain | | | pCMV-SPORT6 |
| | | adenomas | | | | |
| L0637 | NCI_CGAP_Brn53 | three pooled | brain | | | pCMV-SPORT6 |
| | | meningiomas | | | | |
| L0638 | NCI_CGAP_Brn35 | tumor, 5 pooled (see | brain | | | pCMV-SPORT6 |
| | | description) | | | | |
| L0639 | NCI_CGAP_Brn52 | tumor, 5 pooled (see | brain | | | pCMV-SPORT6 |
| | | description) | | | | |
| L0640 | NCI_CGAP_Br18 | four pooled high- | breast | | | pCMV-SPORT6 |
| | | grade tumors, | | | | |
| | | including two prima | | | | |
| L0641 | NCI_CGAP_Co17 | juvenile granulosa | colon | | | pCMV-SPORT6 |
| | | tumor | | | | |
| L0642 | NCI_CGAP_Co18 | moderately | colon | | | pCMV-SPORT6 |
| | | differentiated | | | | |
| | | adenocarcinoma | | | | |
| L0643 | NCI_CGAP_Co19 | moderately | colon | | | pCMV-SPORT6 |
| | | differentiated | | | | |
| | | adenocarcinoma | | | | |
| L0644 | NCI_CGAP_Co20 | moderately | colon | | | pCMV-SPORT6 |
| | | differentiated | | | | |
| | | adenocarcinoma | | | | |
| L0645 | NCI_CGAP_Co21 | moderately | colon | | | pCMV-SPORT6 |
| | | differentiated | | | | |
| | | adenocarcinoma | | | | |
| L0646 | NCI_CGAP_Co14 | moderately- | colon | | | pCMV-SPORT6 |
| | | differentiated | | | | |
| | | adenocarcinoma | | | | |
| L0648 | NCI_CGAP_Eso2 | squamous cell | esophagus | | | pCMV-SPORT6 |
| | | carcinoma | | | | |
| L0649 | NCI_CGAP_GU1 | 2 pooled high-grade | genitourinary | | | pCMV-SPORT6 |
| | | transitional cell | tract | | | |
| | | tumors | | | | |
| L0650 | NCI_CGAP_Kid13 | 2 pooled Wilms' | kidney | | | pCMV-SPORT6 |
| | | tumors, one primary | | | | |
| | | and one metastatic | | | | |
| L0651 | NCI_CGAP_Kid8 | renal cell tumor | kidney | | | pCMV-SPORT6 |
| L0652 | NCI_CGAP_Lu27 | four pooled poorly- | lung | | | pCMV-SPORT6 |
| | | differentiated | | | | |
| | | adenocarcinomas | | | | |
| L0653 | NCI_CGAP_Lu28 | two pooled | lung | | | pCMV-SPORT6 |
| | | squamous cell | | | | |
| | | carcinomas | | | | |
| L0654 | NCI_CGAP_Lu31 | | lung, cell line | | | pCMV-SPORT6 |
| L0655 | NCI_CGAP_Lym12 | lymphoma, | lymph node | | | pCMV-SPORT6 |
| | | follicular | | | | |
| | | mixed small and | | | | |
| | | large cell | | | | |
| L0656 | NCI_CGAP_Ov38 | normal epithelium | ovary | | | pCMV-SPORT6 |
| L0657 | NCI_CGAP_Ov23 | tumor, 5 pooled (see | ovary | | | pCMV-SPORT6 |
| | | description) | | | | |
| L0658 | NCI_CGAP_Ov35 | tumor, 5 pooled (see | ovary | | | pCMV-SPORT6 |
| | | description) | | | | |
| L0659 | NCI_CGAP_Pan1 | adenocarcinoma | pancreas | | | pCMV-SPORT6 |
| L0661 | NCI_CGAP_Mel15 | malignant | skin | | | pCMV-SPORT6 |
| | | melanoma, | | | | |
| | | metastatic to lymph | | | | |
| | | node | | | | |
| L0662 | NCI_CGAP_Gas4 | poorly differentiated | stomach | | | pCMV-SPORT6 |
| | | adenocarcinoma | | | | |
| | | with signet r | | | | |
| L0663 | NCI_CGAP_Ut2 | moderately- | uterus | | | pCMV-SPORT6 |
| | | differentiated | | | | |
| | | endometrial | | | | |
| | | adenocarcinoma | | | | |
| L0664 | NCI_CGAP_Ut3 | poorly-differentiated | uterus | | | pCMV-SPORT6 |
| | | endometrial | | | | |
| | | adenocarcinoma, | | | | |
| L0665 | NCI_CGAP_Ut4 | serous papillary | uterus | | | pCMV-SPORT6 |
| | | carcinoma, high | | | | |
| | | grade, 2 pooled t | | | | |
| L0666 | NCI_CGAP_Ut1 | well-differentiated | uterus | | | pCMV-SPORT6 |
| | | endometrial | | | | |
| | | adenocarcinoma, 7 | | | | |
| L0667 | NCI_CGAP_CML1 | myeloid cells, 18 | whole blood | | | pCMV-SPORT6 |
| | | pooled CML cases, | | | | |
| | | BCR/ABL | | | | |
| | | rearranged | | | | |
| L0697 | Testis 1 | | | | | PGEM 5zf(+) |
| L0708 | NIH_MGC_17 | rhabdomyosarcoma | muscle | | | pOTB7 |
| L0709 | NIH_MGC_21 | choriocarcinoma | placenta | | | pOTB7 |
| L0710 | NIH_MGC_7 | small cell carcinoma | lung | MGC3 | | pOTB7 |
| L0716 | PMA-induced HL60 cell | | | PMA- | | pSPORT 1 |
| | subtraction library | | | induced | | |
| | | | | HL60 | | |
| | | | | human | | |
| | | | | leukemic | | |
| | | | | cell | | |
| | | | | line | | |
| L0717 | Gessler Wilms tumor | | | | | pSPORT1 |
| L0718 | Testis 5 | | | | | pSPORT1 |
| L0731 | Soares pregnant uterus_NbHPU | | uterus | | | pT7T3-Pac |
| L0738 | Human colorectal cancer | | | | | pT7T3D |
| L0740 | Soares melanocyte | melanocyte | | | | pT7T3D |
| | 2NbHM | | | | | (Pharmacia) with a |
| | | | | | | modified polylinker |
| L0741 | Soares adult brain | | brain | | | pT7T3D |
| | N2b4HB55Y | | | | | (Pharmacia) with a |
| | | | | | | modified polylinker |
| L0742 | Soares adult brain | | brain | | | pT7T3D |
| | N2b5HB55Y | | | | | (Pharmacia) with a |
| | | | | | | modified polylinker |
| L0743 | Soares breast 2NbHBst | | breast | | | pT7T3D |
| | | | | | | (Pharmacia) with a |
| | | | | | | modified polylinker |
| L0744 | Soares breast 3NbHBst | | breast | | | pT7T3D |
| | | | | | | (Pharmacia) with a |
| | | | | | | modified polylinker |
| L0745 | Soares retina N2b4HR | retina | eye | | | pT7T3D |
| | | | | | | (Pharmacia) with a |
| | | | | | | modified polylinker |
| L0746 | Soares retina N2b5HR | retina | eye | | | pT7T3D |
| | | | | | | (Pharmacia) with a |
| | | | | | | modified polylinker |
| L0747 | Soares_fetal_heart_NbHH19W | | heart | | | pT7T3D |
| | | | | | | (Pharmacia) with a |
| | | | | | | modified polylinker |
| L0748 | Soares fetal liver spleen | | Liver and | | | pT7T3D |
| | 1NFLS | | Spleen | | | (Pharmacia) with a |
| | | | | | | modified polylinker |
| L0749 | Soares_fetal_liver_spleen_1NFLS_S1 | | Liver and | | | pT7T3D |
| | | | Spleen | | | (Pharmacia) with a |
| | | | | | | modified polylinker |
| L0750 | Soares_fetal_lung_NbHL19W | | lung | | | pT7T3D |
| | | | | | | (Pharmacia) with a |
| | | | | | | modified polylinker |
| L0751 | Soares ovary tumor | ovarian tumor | ovary | | | pT7T3D |
| | NbHOT | | | | | (Pharmacia) with a |
| | | | | | | modified polylinker |
| L0752 | Soares_parathyroid_tumor_NbHPA | parathyroid tumor | parathyroid | | | pT7T3D |
| | | | gland | | | (Pharmacia) with a |
| | | | | | | modified polylinker |
| L0753 | Soares_pineal_gland_N3HPG | | pineal gland | | | pT7T3D |
| | | | | | | (Pharmacia) with a |
| | | | | | | modified polylinker |
| L0754 | Soares placenta Nb2HP | | placenta | | | pT7T3D |
| | | | | | | (Pharmacia) with a |
| | | | | | | modified polylinker |
| L0755 | Soares_placenta_8to9weeks_2NbHP8to9W | | placenta | | | pT7T3D |
| | | | | | | (Pharmacia) with a |
| | | | | | | modified polylinker |
| L0756 | Soares_multiple_sclerosis_2NbHMSP | multiple sclerosis | | | | pT7T3D |
| | | lesions | | | | (Pharmacia) with a |
| | | | | | | modified polylinker |
| | | | | | | V_TYPE |
| L0757 | Soares_senescent_fibroblasts_NbHSF | senescent fibroblast | | | | pT7T3D |
| | | | | | | (Pharmacia) with a |
| | | | | | | modified polylinker |
| | | | | | | V_TYPE |
| L0758 | Soares_testis_NHT | | | | | pT7T3D-Pac |
| | | | | | | (Pharmacia) with a |
| | | | | | | modified polylinker |
| L0759 | Soares_total_fetus_Nb2HF8_9w | | | | | pT7T3D-Pac |
| | | | | | | (Pharmacia) with a |
| | | | | | | modified polylinker |
| L0761 | NCI_CGAP_CLL1 | B-cell, chronic | | | | pT7T3D-Pac |
| | | lymphotic leukemia | | | | (Pharmacia) with a |
| | | | | | | modified polylinker |
| L0762 | NCI_CGAP_Br1.1 | breast | | | | pT7T3D-Pac |
| | | | | | | (Pharmacia) with a |
| | | | | | | modified polylinker |
| L0763 | NCI_CGAP_Br2 | breast | | | | pT7T3D-Pac |
| | | | | | | (Pharmacia) with a |
| | | | | | | modified polylinker |
| L0764 | NCI_CGAP_Co3 | colon | | | | pT7T3D-Pac |
| | | | | | | (Pharmacia) with a |
| | | | | | | modified polylinker |
| L0766 | NCI_CGAP_GCB1 | germinal center B | | | | pT7T3D-Pac |
| | | cell | | | | (Pharmacia) with a |
| | | | | | | modified polylinker |
| L0767 | NCI_CGAP_GC3 | pooled germ cell | | | | pT7T3D-Pac |
| | | tumors | | | | (Pharmacia) with a |
| | | | | | | modified polylinker |
| L0768 | NCI_CGAP_GC4 | pooled germ cell | | | | pT7T3D-Pac |
| | | tumors | | | | (Pharmacia) with a |
| | | | | | | modified polylinker |
| L0769 | NCI_CGAP_Brn25 | anaplastic | brain | | | pT7T3D-Pac |
| | | oligodendroglioma | | | | (Pharmacia) with a |
| | | | | | | modified polylinker |
| L0770 | NCI_CGAP_Brn23 | glioblastoma | brain | | | pT7T3D-Pac |
| | | (pooled) | | | | (Pharmacia) with a |
| | | | | | | modified polylinker |
| L0771 | NCI_CGAP_Co8 | adenocarcinoma | colon | | | pT7T3D-Pac |
| | | | | | | (Pharmacia) with a |
| | | | | | | modified polylinker |
| L0772 | NCI_CGAP_Co10 | colon tumor RER+ | colon | | | pT7T3D-Pac |
| | | | | | | (Pharmacia) with a |
| | | | | | | modified polylinker |
| L0773 | NCI_CGAP_Co9 | colon tumor RER+ | colon | | | pT7T3D-Pac |
| | | | | | | (Pharmacia) with a |
| | | | | | | modified polylinker |
| L0774 | NCI_CGAP_Kid3 | | kidney | | | pT7T3D-Pac |
| | | | | | | (Pharmacia) with a |
| | | | | | | modified polylinker |
| L0775 | NCI_CGAP_Kid5 | 2 pooled tumors | kidney | | | pT7T3D-Pac |
| | | (clear cell type) | | | | (Pharmacia) with a |
| | | | | | | modified polylinker |
| L0776 | NCI_CGAP_Lu5 | carcinoid | lung | | | pT7T3D-Pac |
| | | | | | | (Pharmacia) with a |
| | | | | | | modified polylinker |
| L0777 | Soares_NhHMPu_S1 | Pooled human | mixed (see | | | pT7T3D-Pac |
| | | melanocyte, fetal | below) | | | (Pharmacia) with a |
| | | heart, and pregnant | | | | modified polylinker |
| L0778 | Barstead pancreas | | pancreas | | | pT7T3D-Pac |
| | HPLRB1 | | | | | (Pharmacia) with a |
| | | | | | | modified polylinker |
| L0779 | Soares_NFL_T_GBC_S1 | | pooled | | | pT7T3D-Pac |
| | | | | | | (Pharmacia) with a |
| | | | | | | modified polylinker |
| L0780 | Soares_NSF_F8_9W_OT_PA_P_S1 | | pooled | | | pT7T3D-Pac |
| | | | | | | (Pharmacia) with a |
| | | | | | | modified polylinker |
| L0782 | NCI_CGAP_Pr21 | normal prostate | prostate | | | pT7T3D-Pac |
| | | | | | | (Pharmacia) with a |
| | | | | | | modified polylinker |
| L0783 | NCI_CGAP_Pr22 | normal prostate | prostate | | | pT7T3D-Pac |
| | | | | | | (Pharmacia) with a |
| | | | | | | modified polylinker |
| L0784 | NCI_CGAP_Lei2 | leiomyosarcoma | soft tissue | | | pT7T3D-Pac |
| | | | | | | (Pharmacia) with a |
| | | | | | | modified polylinker |
| L0785 | Barstead spleen | | spleen | | | pT7T3D-Pac |
| | HPLRB2 | | | | | (Pharmacia) with a |
| | | | | | | modified polylinker |
| L0786 | Soares_NbHFB | | whole brain | | | pT7T3D-Pac |
| | | | | | | (Pharmacia) with a |
| | | | | | | modified polylinker |
| L0787 | NCI_CGAP_Sub1 | | | | | pT7T3D-Pac |
| | | | | | | (Pharmacia) with a |
| | | | | | | modified polylinker |
| L0788 | NCI_CGAP_Sub2 | | | | | pT7T3D-Pac |
| | | | | | | (Pharmacia) with a |
| | | | | | | modified polylinker |
| L0789 | NCI_CGAP_Sub3 | | | | | pT7T3D-Pac |
| | | | | | | (Pharmacia) with a |
| | | | | | | modified polylinker |
| L0790 | NCI_CGAP_Sub4 | | | | | pT7T3D-Pac |
| | | | | | | (Pharmacia) with a |
| | | | | | | modified polylinker |
| L0791 | NCI_CGAP_Sub5 | | | | | pT7T3D-Pac |
| | | | | | | (Pharmacia) with a |
| | | | | | | modified polylinker |
| L0792 | NCI_CGAP_Sub6 | | | | | pT7T3D-Pac |
| | | | | | | (Pharmacia) with a |
| | | | | | | modified polylinker |
| L0793 | NCI_CGAP_Sub7 | | | | | pT7T3D-Pac |
| | | | | | | (Pharmacia) with a |
| | | | | | | modified polylinker |
| L0794 | NCI_CGAP_GC6 | pooled germ cell | | | | pT7T3D-Pac |
| | | tumors | | | | (Pharmacia) with a |
| | | | | | | modified polylinker |
| L0796 | NCI_CGAP_Brn50 | medulloblastoma | brain | | | pT7T3D-Pac |
| | | | | | | (Pharmacia) with a |
| | | | | | | modified polylinker |
| L0800 | NCI_CGAP_Co16 | colon tumor, RER+ | colon | | | pT7T3D-Pac |
| | | | | | | (Pharmacia) with a |
| | | | | | | modified polylinker |
| L0803 | NCI_CGAP_Kid11 | | kidney | | | pT7T3D-Pac |
| | | | | | | (Pharmacia) with a |
| | | | | | | modified polylinker |
| L0804 | NCI_CGAP_Kid12 | 2 pooled tumors | kidney | | | pT7T3D-Pac |
| | | (clear cell type) | | | | (Pharmacia) with a |
| | | | | | | modified polylinker |
| L0805 | NCI_CGAP_Lu24 | carcinoid | lung | | | pT7T3D-Pac |
| | | | | | | (Pharmacia) with a |
| | | | | | | modified polylinker |
| L0806 | NCI_CGAP_Lu19 | squamous cell | lung | | | pT7T3D-Pac |
| | | carcinoma, poorly | | | | (Pharmacia) with a |
| | | differentiated (4 | | | | modified polylinker |
| L0807 | NCI_CGAP_Ov18 | fibrotheoma | ovary | | | pT7T3D-Pac |
| | | | | | | (Pharmacia) with a |
| | | | | | | modified polylinker |
| L0808 | Barstead prostate BPH | | prostate | | | pT7T3D-Pac |
| | HPLRB4 1 | | | | | (Pharmacia) with a |
| | | | | | | modified polylinker |
| L0809 | NCI_CGAP_Pr28 | | prostate | | | pT7T3D-Pac |
| | | | | | | (Pharmacia) with a |
| | | | | | | modified polylinker |
| L0946 | BT0333 | | breast | | | puc18 |
| L0988 | BT0387 | | breast | | | puc18 |
| L1057 | BT0559 | | breast | | | puc18 |
| L1441 | CT0249 | | colon | | | puc18 |
| L1562 | CN0027 | | colon_normal | | | puc18 |
| L1726 | HT0157 | | head_neck | | | puc18 |
| L1733 | HT0165 | | head_neck | | | puc18 |
| L1789 | HT0230 | | head_neck | | | puc18 |
| L1877 | HT0340 | | head_neck | | | puc18 |
| L2048 | ST0029 | | stomach | | | puc18 |
| L2093 | ST0124 | | stomach | | | puc18 |
| L2094 | ST0125 | | stomach | | | puc18 |
| L2116 | ST0163 | | stomach | | | puc18 |
| L2158 | ST0215 | | stomach | | | puc18 |
| L2174 | ST0240 | | stomach | | | puc18 |
| L2197 | ST0278 | | stomach | | | puc18 |
| L2200 | ST0281 | | stomach | | | puc18 |
| L2251 | Human fetal lung | Fetal lung | | | | |
| L2255 | GLC | corresponding non | | | | pBluescript sk(−) |
| | | cancerous liver | | | | |
| | | tissue | | | | |
| L2257 | NIH_MGC_65 | adenocarcinoma | colon | | | pCMV-SPORT6 |
| L2258 | NIH_MGC_67 | retinoblastoma | eye | | | pCMV-SPORT6 |
| L2259 | NIH_MGC_68 | large cell carcinoma | lung | | | pCMV-SPORT6 |
| L2260 | NIH_MGC_69 | large cell | lung | | | pCMV-SPORT6 |
| | | carcinoma, | | | | |
| | | undifferentiated | | | | |
| L2261 | NIH_MGC_70 | epithelioid | pancreas | | | pCMV-SPORT6 |
| | | carcinoma | | | | |
| L2262 | NIH_MGC_72 | melanotic melanoma | skin | | | pCMV-SPORT6 |
| L2263 | NIH_MGC_66 | adenocarcinoma | ovary | | | pCMV-SPORT6 |
| L2264 | NIH_MGC_71 | leiomyosarcoma | uterus | | | pCMV-SPORT6 |
| L2265 | NIH_MGC_39 | adenocarcinoma | pancreas | | | pOTB7 |
| L2269 | NCI_CGAP_Thy11 | follicular carcinoma | thyroid | | | pAMP10 |
| L2282 | BT0703 | | breast | | | puc18 |
| L2289 | BT0757 | | breast | | | puc18 |
| L2300 | BT0789 | | breast | | | puc18 |
| L2308 | CT0383 | | colon | | | puc18 |
| L2319 | CT0402 | | colon | | | puc18 |
| L2359 | UT0023 | | uterus_tumor | | | puc18 |
| L2366 | UT0038 | | uterus_tumor | | | puc18 |
| L2392 | NN0091 | | nervous_normal | | | puc18 |
| L2442 | NN1025 | | nervous_normal | | | puc18 |
| L2453 | NN1071 | | nervous_normal | | | puc18 |
| L2476 | HT0084 | | head_neck | | | puc18 |
| L2477 | HT0408 | | head_neck | | | puc18 |
| L2480 | HT0448 | | head_neck | | | puc18 |
| L2490 | HT0545 | | head_neck | | | puc18 |
| L2491 | HT0559 | | head_neck | | | puc18 |
| L2494 | HT0577 | | head_neck | | | puc18 |
| L2497 | HT0618 | | head_neck | | | puc18 |
| L2498 | HT0619 | | head_neck | | | puc18 |
| L2504 | HT0636 | | head_neck | | | puc18 |
| L2513 | HT0678 | | head_neck | | | puc18 |
| L2519 | HT0698 | | head_neck | | | puc18 |
| L2541 | HT0730 | | head_neck | | | puc18 |
| L2543 | HT0734 | | head_neck | | | puc18 |
| L2562 | HT0760 | | head_neck | | | puc18 |
| L2570 | HT0771 | | head_neck | | | puc18 |
| L2578 | HT0785 | | head_neck | | | puc18 |
| L2610 | HT0837 | | head_neck | | | puc18 |
| L2614 | HT0841 | | head_neck | | | puc18 |
| L2627 | HT0861 | | head_neck | | | puc18 |
| L2630 | HT0865 | | head_neck | | | puc18 |
| L2636 | HT0876 | | head_neck | | | puc18 |
| L2637 | HT0877 | | head_neck | | | puc18 |
| L2638 | HT0878 | | head_neck | | | puc18 |
| L2640 | HT0881 | | head_neck | | | puc18 |
| L2641 | HT0882 | | head_neck | | | puc18 |
| L2643 | HT0885 | | head_neck | | | puc18 |
| L2644 | HT0886 | | head_neck | | | puc18 |
| L2647 | HT0894 | | head_neck | | | puc18 |
| L2650 | HT0934 | | head_neck | | | puc18 |
| L2651 | NIH_MGC_20 | melanotic melanoma | skin | | | pOTB7 |
| L2652 | NIH_MGC_57 | glioblastoma | brain | | | pDNR-LIB |
| | | | | | | (Clontech) |
| L2653 | NIH_MGC_58 | hypernephroma | kidney | | | pDNR-LIB |
| | | | | | | (Clontech) |
| L2654 | NIH_MGC_9 | adenocarcinoma cell | ovary | | | pOTB7 |
| | | line | | | | |
| L2655 | NIH_MGC_55 | from acute | bone marrow | | | pDNR-LIB |
| | | myelogenous | | | | (Clontech) |
| | | leukemia | | | | |
| L2657 | NIH_MGC_54 | from chronic | bone marrow | | | pDNR-LIB |
| | | myelogenous | | | | (Clontech) |
| | | leukemia | | | | |
| L2669 | NT0022 | | nervous_tumor | | | puc18 |
| L2694 | NT0080 | | nervous_tumor | | | puc18 |
| L2695 | NT0081 | | nervous_tumor | | | puc18 |
| L2708 | NT0104 | | nervous_tumor | | | puc18 |
| L2730 | GN0021 | | placenta_normal | | | puc18 |
| L2744 | FT0004 | | prostate_tumor | | | puc18 |
| L2754 | FT0022 | | prostate_tumor | | | puc18 |
| L2756 | FT0024 | | prostate_tumor | | | puc18 |
| L2771 | FT0050 | | prostate_tumor | | | puc18 |
| L2788 | FT0071 | | prostate_tumor | | | puc18 |
| L2789 | FT0073 | | prostate_tumor | | | puc18 |
| L2799 | FT0096 | | prostate_tumor | | | puc18 |
| L2817 | FT0131 | | prostate_tumor | | | puc18 |
| L2819 | FT0134 | | prostate_tumor | | | puc18 |
| L2844 | UM0018 | | uterus | | | puc18 |
| L2847 | UM0023 | | uterus | | | puc18 |
| L2853 | UM0081 | | uterus | | | puc18 |
| L2854 | UM0091 | | uterus | | | puc18 |
| L2870 | AN0013 | | amnion_normal | | | puc18 |
| L2880 | AN0033 | | amnion_normal | | | puc18 |
| L2884 | AN0041 | | amnion_normal | | | puc18 |
| L2888 | AN0056 | | amnion_normal | | | puc18 |
| L2893 | AN0062 | | amnion_normal | | | puc18 |
| L2906 | BN0047 | | breast_normal | | | puc18 |
| L2910 | BN0070 | | breast_normal | | | puc18 |
| L2914 | BN0090 | | breast_normal | | | puc18 |
| L2919 | BN0115 | | breast_normal | | | puc18 |
| L2995 | BN0269 | | breast_normal | | | puc18 |
| L3041 | BN0332 | | breast_normal | | | puc18 |
| L3044 | BN0335 | | breast_normal | | | puc18 |
| L3078 | EN0042 | | lung_normal | | | puc18 |
| L3082 | ET0008 | | lung_tumor | | | puc18 |
| L3104 | ET0041 | | lung_tumor | | | puc18 |
| L3118 | ET0070 | | lung_tumor | | | puc18 |
| L3135 | MT0025 | | marrow | | | puc18 |
| L3162 | MT0061 | | marrow | | | puc18 |
| L3181 | MT0107 | | marrow | | | puc18 |
| L3182 | MT0108 | | marrow | | | puc18 |
| L3204 | OT0034 | | ovary | | | puc18 |
| L3207 | OT0063 | | ovary | | | puc18 |
| L3209 | OT0065 | | ovary | | | puc18 |
| L3210 | OT0067 | | ovary | | | puc18 |
| L3212 | OT0076 | | ovary | | | puc18 |
| L3215 | OT0083 | | ovary | | | puc18 |
| L3255 | FN0064 | | prostate_normal | | | puc18 |
| L3281 | FN0107 | | prostate_normal | | | puc18 |
| L3295 | FN0138 | | prostate_normal | | | puc18 |
| L3313 | FN0182 | | prostate_normal | | | puc18 |
| L3323 | SN0016 | | stomach_normal | | | puc18 |
| L3352 | TN0027 | | testis_normal | | | puc18 |
| L3355 | TN0032 | | testis_normal | | | puc18 |
| L3359 | TN0036 | | testis_normal | | | puc18 |
| L3374 | TN0070 | | testis_normal | | | puc18 |
| L3376 | TN0078 | | testis_normal | | | puc18 |
| L3377 | TN0079 | | testis_normal | | | puc18 |
| L3387 | GKB | hepatocellular | | | | pBluescript sk(−) |
| | | carcinoma | | | | |
| L3388 | GKC | hepatocellular | | | | pBluescript sk(−) |
| | | carcinoma | | | | |
| L3389 | GKD | hepatocellular | | | | pBluescript sk(−) |
| | | carcinoma | | | | |
| L3391 | NIH_MGC_53 | carcinoma, cell line | bladder | | | pDNR-LIB |
| | | | | | | (Clontech) |
| L3401 | AN0085 | | amnion_normal | | | puc18 |
| L3421 | BT0634 | | breast | | | puc18 |
| L3439 | CT0478 | | colon | | | puc18 |
| L3450 | CT0508 | | colon | | | puc18 |
| L3467 | GN0024 | | placenta_normal | | | puc18 |
| L3485 | GN0070 | | placenta_normal | | | puc18 |
| L3491 | GN0076 | | placenta_normal | | | puc18 |
| L3495 | HT0570 | | head_neck | | | puc18 |
| L3496 | HT0572 | | head_neck | | | puc18 |
| L3501 | HT0817 | | head_neck | | | puc18 |
| L3503 | HT0870 | | head_neck | | | puc18 |
| L3506 | HT0879 | | head_neck | | | puc18 |
| L3508 | HT0888 | | head_neck | | | puc18 |
| L3509 | HT0890 | | head_neck | | | puc18 |
| L3511 | HT0900 | | head_neck | | | puc18 |
| L3513 | HT0907 | | head_neck | | | puc18 |
| L3518 | HT0915 | | head_neck | | | puc18 |
| L3526 | HT0931 | | head_neck | | | puc18 |
| L3547 | NN0045 | | nervous_normal | | | puc18 |
| L3580 | TN0098 | | testis_normal | | | puc18 |
| L3603 | UM0093 | | uterus | | | puc18 |
| L3610 | UT0009 | | uterus_tumor | | | puc18 |
| L3612 | UT0011 | | uterus_tumor | | | puc18 |
| L3618 | UT0050 | | uterus_tumor | | | puc18 |
| L3620 | UT0058 | | uterus_tumor | | | puc18 |
| L3626 | UT0064 | | uterus_tumor | | | puc18 |
| L3630 | UT0071 | | uterus_tumor | | | puc18 |
| L3633 | UT0082 | | uterus_tumor | | | puc18 |
| L3634 | NIH_MGC_56 | primitive | brain | | | pDNR-LIB |
| | | neuroectoderm | | | | (Clontech) |
| L3635 | NIH_MGC_62 | melanotic | skin | | | pDNR-LIB |
| | | melanoma, high | | | | (Clontech) |
| | | MDR | | | | |
| L3638 | NIH_MGC_78 | | pancreas | | | pDNR-LIB |
| | | | | | | (Clontech) |
| L3639 | NIH_MGC_81 | | muscle | | | pDNR-LIB |
| | | | (skeletal) | | | (Clontech) |
| L3640 | NIH_MGC_82 | | testis | | | pDNR-LIB |
| | | | | | | (Clontech) |
| L3641 | NIH_MGC_83 | | prostate | | | pDNR-LIB |
| | | | | | | (Clontech) |
| L3643 | ADB | Adrenal gland | | | | pBluescript sk(−) |
| L3644 | ADC | Adrenal gland | | | | pBluescript sk(−) |
| L3645 | Cu | adrenal cortico | | | | pBluescript sk(−) |
| | | adenoma for | | | | |
| | | Cushing's syndrome | | | | |
| L3646 | DCA | | | | | pTriplEx2 |
| L3649 | DCB | | | | | pTriplEx2 |
| L3653 | HTB | Hypothalamus | | | | pBluescript sk(−) |
| L3655 | HTC | Hypothalamus | | | | pBluescript sk(−) |
| L3659 | CB | cord blood | | | | pBluescript |
| L3661 | NPA | pituitary | | | | pBluescript sk(−) |
| L3663 | NIH_MGC_60 | adenocarcinoma | prostate | | | pDNR-LIB |
| | | | | | | (Clontech) |
| L3666 | NIH_MGC_77 | | lung | | | pDNR-LIB |
| | | | | | | (Clontech) |
| L3667 | NIH_MGC_79 | | placenta | | | pDNR-LIB |
| | | | | | | (Clontech) |
| L3673 | AN0084 | | amnion_normal | | | puc18 |
| L3684 | BT0812 | | breast | | | puc18 |
| L3705 | CT0486 | | colon | | | puc18 |
| L3708 | CT0514 | | colon | | | puc18 |
| L3739 | HT0540 | | head_neck | | | puc18 |
| L3743 | HT0909 | | head_neck | | | puc18 |
| L3744 | HT0916 | | head_neck | | | puc18 |
| L3750 | HT0945 | | head_neck | | | puc18 |
| L3751 | HT0946 | | head_neck | | | puc18 |
| L3752 | HT0947 | | head_neck | | | puc18 |
| L3778 | TN0112 | | testis_normal | | | puc18 |
| L3797 | UT0043 | | uterus_tumor | | | puc18 |
| L3803 | UT0053 | | uterus_tumor | | | puc18 |
| L3804 | UT0073 | | uterus_tumor | | | puc18 |
| L3809 | UT0087 | | uterus_tumor | | | puc18 |
| L3811 | NPC | pituitary | | | | pBluescript sk(−) |
| L3814 | BM | Bone marrow | | | | pTriplEx2 |
| L3815 | MDS | Bone marrow | | | | pTriplEx2 |
| L3816 | HEMBA1 | whole embryo, | | | | pME18SFL3 |
| | | mainly head | | | | |
| L3817 | HEMBB1 | whole embryo, | | | | pME18SFL3 |
| | | mainly body | | | | |
| L3818 | MAMMA1 | mammary gland | | | | pME18SFL3 |
| L3819 | NIH_MGC_76 | | liver | | | pDNR-LIB |
| | | | | | | (Clontech) |
| L3820 | NIH_MGC_46 | leiomyosarcoma cell | uterus | | | pOTB7 |
| | | line | | | | |
| L3821 | NIH_MGC_48 | primary B-cells | B-cells | | | pOTB7 |
| | | from tonsils | | | | |
| | | (cell line) | | | | |
| L3824 | NT2RM2 | | | NT2 | | pME18SFL3 |
| L3825 | NT2RM4 | | | NT2 | | pME18SFL3 |
| L3826 | NT2RP1 | | | NT2 | | pUC19FL3 |
| L3827 | NT2RP2 | | | NT2 | | pME18SFL3 |
| L3828 | NT2RP3 | | | NT2 | | pME18SFL3 |
| L3829 | NT2RP4 | | | NT2 | | pME18SFL3 |
| L3831 | OVARC1 | ovary, tumor tissue | | | | pME18SFL3 |
| L3832 | PLACE1 | placenta | | | | pME18SFL3 |
| L3834 | PLACE3 | placenta | | | | pME18SFL3 |
| L3835 | PLACE4 | placenta | | | | pME18SFL3 |
| L3837 | THYRO1 | thyroid gland | | | | pME18SFL3 |
| L3839 | Y79AA1 | | | Y79 | | pME18SFL3 |
| L3841 | NIH_MGC_18 | large cell carcinoma | lung | | | pOTB7 |
| L3848 | BN0408 | | breast_normal | | | puc18 |
| L3861 | BT0850 | | breast | | | puc18 |
| L3863 | HT0538 | | head_neck | | | puc18 |
| L3871 | NIH_MGC_19 | neuroblastoma | brain | | | pOTB7 |
| L3872 | NCI_CGAP_Skn1 | | skin, normal, 4 | | | pCMV-SPORT6 |
| | | | pooled sa | | | |
| L3888 | CS0018 | | colon_est | | | puc18 |
| L3904 | NCI_CGAP_Brn64 | glioblastoma with | brain | | | pCMV-SPORT6 |
| | | EGFR amplification | | | | |
| L3905 | NCI_CGAP_Brn67 | anaplastic | brain | | | pCMV-SPORT6 |
| | | oligodendroglioma | | | | |
| | | with 1p/19q loss | | | | |
| L4067 | BT0724 | | breast | | | puc18 |
| L4142 | HT0016 | | head_neck | | | puc18 |
| L4347 | NN1073 | | nervous_normal | | | puc18 |
| L4350 | NN1145 | | nervous_normal | | | puc18 |
| L4353 | NN1148 | | nervous_normal | | | puc18 |
| L4424 | UM0003 | | uterus | | | puc18 |
| L4435 | UM0025 | | uterus | | | puc18 |
| L4441 | UM0038 | | uterus | | | puc18 |
| L4496 | Lupski_sciatic_nerve | sciatic nerve | | | | pCMV-SPORT6 |
| | | | | | | (Life Technologies) |
| L4498 | Lupski_sympathetic_trunk | sympathetic trunk | | | | pCMV-SPORT6 |
| | | | | | | (Life Technologies) |
| L4501 | NCI_CGAP_Sub8 | | | | | pT7T3D-Pac |
| | | | | | | (Pharmacia) with a |
| | | | | | | modified polylinker |
| L4508 | NCI_CGAP_Thy8 | normal epithelium | thyroid | | | pAMP10 |
| L4557 | NCI_CGAP_Adr1 | neuroblastoma | adrenal gland | | | pCMV-SPORT6 |
| L4558 | NCI_CGAP_Pan3 | | pancreas | | | pCMV-SPORT6 |
| L4559 | NCI_CGAP_Thy3 | follicular carcinoma | thyroid | | | pCMV-SPORT6 |
| L4669 | NCI_CGAP_Ov41 | serous papillary | ovary | | | pCMV-SPORT6 |
| | | tumor | | | | |
| L4747 | NCI_CGAP_Brn41 | oligodendroglioma | brain | | | pT7T3D-Pac |
| | | | | | | (Pharmacia) with a |
| | | | | | | modified polylinker |
| L4772 | NIH_MGC_42 | epithelioid | pancreas | | | pOTB7 |
| | | carcinoma cell line | | | | |
| L4773 | NIH_MGC_45 | renal carcinoma | kidney | | | pOTB7 |
| | | (ascites) | | | | |
| L4778 | NIH_MGC_43 | normal pigmented | eye | | | pOTB7 |
| | | retinal epithelium | | | | |
| L4779 | NIH_MGC_49 | melanotic | skin | | | pOTB7 |
| | | melanoma, high | | | | |
| | | MDR (cell line) | | | | |
| L4784 | microdissected normal | epidermis | skin | | | pAMP1 |
| | human epidermis | | | | | |
| L4788 | Human Iris cDNA (Un- | Iris | Eye | | | pCMVSPORT6 |
| | normalized, | | | | | |
| | unamplified) | | | | | |
| L4795 | AN0080 | | amnion_normal | | | puc18 |
| L4799 | KT0015 | | bladder_tumor | | | puc18 |
| L4801 | KT0002 | | bladder_tumor | | | puc18 |
| L4811 | KT0040 | | bladder_tumor | | | puc18 |
| L4813 | KT0042 | | bladder_tumor | | | puc18 |
| L4815 | KT0041 | | bladder_tumor | | | puc18 |
| L4817 | KT0035 | | bladder_tumor | | | puc18 |
| L4824 | KT0030 | | bladder_tumor | | | puc18 |
| L4845 | HB0037 | | bocio_tumor | | | puc18 |
| L4852 | BT0845 | | breast | | | puc18 |
| L4860 | BT0826 | | breast | | | puc18 |
| L4868 | BT0858 | | breast | | | puc18 |
| L4884 | BN0414 | | breast_normal | | | puc18 |
| L4888 | BN0416 | | breast_normal | | | puc 18 |
| L4890 | BN0424 | | breast_normal | | | puc 18 |
| L4900 | BN0428 | | breast_normal | | | puc 18 |
| L4925 | EN0063 | | lung_normal | | | puc18 |
| L4940 | EN0083 | | lung_normal | | | puc18 |
| L4948 | EN0086 | | lung_normal | | | puc18 |
| L4949 | EN0102 | | lung_normal | | | puc18 |
| L4970 | EN0093 | | lung_normal | | | puc18 |
| L4986 | FN0194 | | prostate_normal | | | puc18 |
| L4995 | FT0194 | | prostate_tumor | | | puc18 |
| L5010 | ET0149 | | lung_tumor | | | puc18 |
| L5012 | ET0119 | | lung_tumor | | | puc18 |
| L5031 | ET0095 | | lung_tumor | | | puc18 |
| L5032 | ET0097 | | lung_tumor | | | puc18 |
| L5038 | ET0105 | | lung_tumor | | | puc18 |
| L5042 | ET0104 | | lung_tumor | | | puc18 |
| L5049 | ET0101 | | lung_tumor | | | puc18 |
| L5050 | ET0136 | | lung_tumor | | | puc18 |
| L5054 | ET0106 | | lung_tumor | | | puc18 |
| L5067 | ET0171 | | lung_tumor | | | puc18 |
| L5070 | ET0188 | | lung_tumor | | | puc18 |
| L5080 | ET0183 | | lung_tumor | | | puc18 |
| L5105 | TN0182 | | testis_normal | | | puc18 |
| L5123 | MT0146 | | marrow | | | puc18 |
| L5125 | MT0152 | | marrow | | | puc18 |
| L5145 | MT0147 | | marrow | | | puc18 |
| L5152 | MT0160 | | marrow | | | puc18 |
| L5156 | MT0179 | | marrow | | | puc18 |
| L5169 | MT0228 | | marrow | | | puc18 |
| L5170 | MT0226 | | marrow | | | puc18 |
| L5222 | UT0097 | | uterus_tumor | | | puc18 |
| L5229 | UT0114 | | uterus_tumor | | | puc18 |
| L5236 | UT0115 | | uterus_tumor | | | puc18 |
| L5238 | UT0112 | | uterus_tumor | | | puc18 |
| L5241 | NIH_MGC_86 | osteosarcoma, cell | bone | | | pCMV-SPORT6 |
| | | line | | | | |
| L5242 | NIH_MGC_95 | hippocampus, cell | brain | | | pBluescriptR |
| | | line | | | | (modified |
| | | | | | | pBluescript KS+) |
| L5243 | NIH_MGC_96 | hypothalamus, cell | brain | | | pBluescriptR |
| | | line | | | | (modified |
| | | | | | | pBluescript KS+) |
| L5244 | NIH_MGC_84 | adrenal cortex | adrenal gland | | | pCMV-SPORT6 |
| | | carcinoma, cell line | | | | |
| L5255 | NT0203 | | nervous_tumor | | | puc18 |
| L5273 | NT0273 | | nervous_tumor | | | puc18 |
| L5286 | NCI_CGAP_Thy10 | medullary | thyroid | | | pAMP10 |
| | | carcinoma | | | | |
| L5300 | NN1156 | | nervous_normal | | | puc18 |
| L5306 | NN0219 | | nervous_normal | | | puc18 |
| L5312 | NN1200 | | nervous_normal | | | puc18 |
| L5370 | NN0244 | | nervous_normal | | | puc18 |
| L5389 | NIH_MGC_88 | duodenal | small intestine | | | pCMV-SPORT6 |
| | | adenocarcinoma, | | | | |
| | | cell line | | | | |
| L5401 | GN0141 | | placenta_normal | | | puc18 |
| L5403 | GN0150 | | placenta_normal | | | puc18 |
| L5404 | GN0103 | | placenta_normal | | | puc18 |
| L5438 | GN0216 | | placenta_normal | | | puc18 |
| L5442 | GN0165 | | placenta_normal | | | puc18 |
| L5448 | GN0157 | | placenta_normal | | | puc18 |
| L5460 | NIH_MGC_85 | lymphoma, cell line | lymph | | | pCMV-SPORT6 |
| L5461 | NIH_MGC_87 | mammary | breast | | | pCMV-SPORT6 |
| | | adenocarcinoma, | | | | |
| | | cell line | | | | |
| L5462 | NIH_MGC_90 | adenocarcinoma, | liver | | | pCMV-SPORT6 |
| | | cell line | | | | |
| L5565 | NCI_CGAP_Brn66 | glioblastoma with | brain | | | pCMV-SPORT6 |
| | | probably TP53 | | | | |
| | | mutation | | | | |
| L5569 | NCI_CGAP_HN17 | normal epithelium | nasopharynx | | | pAMP10 |
| L5575 | NCI_CGAP_Brn65 | glioblastoma | brain | | | pCMV-SPORT6 |
| | | without EGFR | | | | |
| | | amplification | | | | |
| L5622 | NCI_CGAP_Skn3 | | skin | | | pCMV-SPORT6 |
| L5623 | NCI_CGAP_Skn4 | squamous cell | skin | | | pCMV-SPORT6 |
| | | carcinoma | | | | |
| L6411 | NCI_CGAP_Sub9 | mixed | | | | pT7T3-Pac |
| | | | | | | (Pharmacia) with a |
| | | | | | | modified polylinker |
| L6412 | NCI_CGAP_DF0 | Subchondral Bone | Bone | | | pT7T3-Pac |
| | | | | | | (Pharmacia) with a |
| | | | | | | modified polylinker |
| L6413 | NCI_CGAP_DH0 | Metastatic | Lung | | | pT7T3-Pac |
| | | Chondrosarcoma | | | | (Pharmacia) with a |
| | | | | | | modified polylinker |
| L6414 | NCI_CGAP_DI0 | Lung Focal Fibrosis | Lung | | | pT7T3-Pac |
| | | | | | | (Pharmacia) with a |
| | | | | | | modified polylinker |
| L6415 | NCI_CGAP_Fs1 | Fibrosarcoma | | | | pT7T3-Pac |
| | | | | | | (Pharmacia) with a |
| | | | | | | modified polylinker |
| L6416 | NCI_CGAP_DF1 | Subchondral Bone | Bone | | | pT7T3-Pac |
| | | | | | | (Pharmacia) with a |
| | | | | | | modified polylinker |
| L6417 | NCI_CGAP_DT0 | Metastatic | Lung | | | pT7T3-Pac |
| | | Chondrosarcoma | | | | (Pharmacia) with a |
| | | | | | | modified polylinker |
| L6418 | NCI_CGAP_DT1 | Metastatic | Lung | | | pT7T3-Pac |
| | | Chondrosarcoma | | | | (Pharmacia) with a |
| | | | | | | modified polylinker |
| L6419 | NCI_CGAP_ED0 | Chondrosarcoma | Left Pubic | | | pT7T3-Pac |
| | | | Bone | | | (Pharmacia) with a |
| | | | | | | modified polylinker |
| L6420 | NCI_CGAP_DH1 | Metastatic | Lung | | | pT7T3-Pac |
| | | Chondrosarcoma | | | | (Pharmacia) with a |
| | | | | | | modified polylinker |
| L6421 | NCI_CGAP_EI1 | Chondrosarcoma | Left Pelvis | | | pT7T3-Pac |
| | | | | | | (Pharmacia) with a |
| | | | | | | modified polylinker |
| L6423 | NCI_CGAP_EI0 | Chondrosarcoma | Left Pelvis | | | pT7T3-Pac |
| | | | | | | (Pharmacia) with a |
| | | | | | | modified polylinker |
| L6424 | NCI_CGAP_P12 | Placenta | Placenta | | | pT7T3-Pac |
| | | | | | | (Pharmacia) with a |
| | | | | | | modified polylinker |
| L6425 | NCI_CGAP_ED1 | Chondrosarcoma | Left Pubic | | | pT7T3-Pac |
| | | | Bone | | | (Pharmacia) with a |
| | | | | | | modified polylinker |
| L6426 | NCI_CGAP_P13 | Placenta | Placenta | | | pT7T3-Pac |
| | | | | | | (Pharmacia) with a |
| | | | | | | modified polylinker |
| L6427 | NCI_CGAP_P16 | Placenta | Placenta | | | pT7T3-Pac |
| | | | | | | (Pharmacia) with a |
| | | | | | | modified polylinker |
| L6432 | NCI_CGAP_Car1 | Osteoarthritic | Knee | | | pT7T3-Pac |
| | | Cartilage | | | | (Pharmacia) with a |
| | | | | | | modified polylinker |
| L7065 | NCI_CGAP_Ct1 | Osteoarthritic | Knee | | | pT7T3-Pac |
| | | Cartilage | | | | (Pharmacia) with a |
| | | | | | | modified polylinker |
| L7068 | NCI_GGAP_Ch1 | Chondrosarcoma | Left Pelvis | | | pT7T3-Pac |
| | | Grade II | | | | (Pharmacia) with a |
| | | | | | | modified polylinker |
| L7069 | NCI_CGAP_Ch2 | Chondrosarcoma | Left Pelvis | | | pT7T3-Pac |
| | | Grade II | | | | (Pharmacia) with a |
| | | | | | | modified polylinker |

Description of Table 5

[1066] Table 5 provides a key to the OMIM reference identification numbers disclosed in Table 1B, column 10. OMIM reference identification numbers (Table 5, Column 1) were derived from Online Mendelian Inheritance in Man (Online Mendelian Inheritance in Man, OMIM. McKusick-Nathans Institute for Genetic Medicine, Johns Hopkins University (Baltimore, Md.) and National Center for Biotechnology Information, National Library of Medicine, (Bethesda, Md.) (2000). World Wide Web URL: http://www.ncbi.nlm.nih.gov/omim/). Column 2 provides diseases associated with the cytologic band disclosed in Table 1B, column 10, as determined using the Morbid Map database.

TABLE 5

| OMIM Reference | Description |
|---|---|
| 100678 | ACAT2 deficiency |
| 102300 | Restless legs syndrome |
| 102480 | Male infertility due to acrosin deficiency |
| 102600 | Urolithiasis, 2,8-dihydroxyadenine |
| 102680 | Hypertension, essential, salt-sensitive, 145500 |
| 103050 | Autism, succinylpurinemic |
| 103050 | Adenylosuccinase deficiency |
| 103600 | Analbuminemia |
| 103600 | [Dysalbuminemic hyperthyroxinemia] |
| 103600 | [Dysalbuminemic hyperzincemia], 194470 |
| 103950 | Alzheimer disease, susceptibility to |
| 103950 | Emphysema due to alpha-2-macroglobulin deficiency |
| 104150 | [AFP deficiency, congenital] |
| 104150 | [Hereditary persistence of alpha-fetoprotein] |
| 104500 | Amelogenesis imperfecta-2, hypoplastic local type |
| 107300 | Antithrombin III deficiency |
| 108600 | Spastic ataxia, autosomal dominant |
| 108725 | Atherosclerosis, susceptibility to |
| 108730 | Brody myopathy, 601003 |
| 108962 | Hypertension, salt-resistant |
| 109270 | Hemolytic anemia due to band 3 defect |
| 109270 | Renal tubular acidosis, distal, 179800 |
| 109270 | Spherocytosis, hereditary |
| 109270 | [Acanthocytosis, one form] |
| 109270 | [Diego blood group], 110500 |
| 109270 | [Elliptocytosis, Malaysian-Melanesian type] |
| 109480 | [Blood group OK], 111380 |
| 109535 | Immunodeficiency with hyper-IgM, type 3, 606843 |
| 109690 | Asthma, nocturnal, susceptibility to |
| 109690 | Obesity, susceptibility to |
| 110600 | [Dombrock blood group] |
| 114208 | Hypokalemic periodic paralysis, 170400 |
| 114208 | Malignant hyperthermia susceptibility 5, 601887 |
| 114290 | Acampomelic campolelic dysplasia |
| 114290 | Campomelic dysplasia |
| 114290 | Campomelic dysplasia with autosomal sex reversal |
| 115660 | Cataract, cerulean, type 1 |
| 117800 | [Earwax, wet/dry] |
| 118485 | Lipoid congenital adrenal hyperplasia, 201710 |
| 118485 | Polycystic ovary syndrome, 184700 |
| 120150 | Osteogenesis imperfecta, type I, 166200 |
| 120150 | Osteogenesis imperfecta, type II, 166210 |
| 120150 | Osteogenesis imperfecta, type III, 259420 |
| 120150 | Osteogenesis imperfecta, type IV, 166220 |
| 120150 | Osteoporosis, idiopathic, 166710 |
| 120150 | Dissection of cervical arteries |
| 120150 | Ehlers-Danlos syndrome, type I, 130000 |
| 120150 | Ehlers-Danlos syndrome, type VII, 130060 |
| 120160 | Marfan syndrome, atypical |
| 120160 | Osteogenesis imperfecta, 3 clinical forms, 166200, 166210, 259420 |
| 120160 | Osteoporosis, idiopathic, 166710 |
| 120160 | Ehlers-Danlos syndrome, type VIIA2, 130060 |
| 120502 | Branchiootic syndrome 2 |
| 120580 | C1r/C1s is deficiency, combined |
| 120580 | C1s deficiency, isolated |
| 120620 | [Knops blood group system], 607486 |
| 120620 | SLE susceptibility |
| 120620 | CR1 deficiency |
| 120700 | C3 deficiency |
| 120920 | Measles, susceptibility to |
| 121050 | Contractural arachnodactyly, congenital |
| 124030 | Parkinsonism, susceptibility to |
| 124030 | Debrisoquine sensitivity |
| 125647 | Keratosis palmoplantaris striata II |
| 125647 | Arrhythmogenic right ventricular dysplasia 8, 607450 |
| 125647 | Skin fragility-woolly hair syndrome, 607655 |
| 125647 | Dilated cardiomyopathy with woolly hair and keratoderma, 605676 |
| 125852 | Diabetes mellitus, insulin-dependent, 2 |
| 126337 | Myxoid liposarcoma |
| 126452 | Autonomic nervous system dysfunction |
| 126452 | [Novelty seeking personality], 601696 |
| 126650 | Chloride diarrhea, congenital, Finnish type, 214700 |
| 126650 | Colon cancer |
| 128200 | Paroxysmal kinesigenic choreoathetosis |
| 130130 | Hematopoiesis, cyclic, 162800 |
| 130130 | Neutropenia, congenital, 202700 |
| 131210 | Atherosclerosis, susceptibility to |
| 131400 | Eosinophilia, familial |
| 131440 | Eosinophilic myeloproliferative disorder |
| 133171 | [Erythrocytosis, familial], 133100 |
| 134370 | Factor H deficiency |
| 134370 | Hemolytic-uremic syndrome, 235400 |
| 134370 | Membroproliferative glomerulonephritis |
| 134370 | Nephropathy, chronic hypocomplementemic |
| 134570 | Factor XIIIA deficiency |
| 134580 | Factor XIIIB deficiency |
| 134934 | Hypochondroplasia, 146000 |
| 134934 | Muencke syndrome, 602849 |
| 134934 | Thanatophoric dysplasia, types I and II, 187600 |
| 134934 | Bladder cancer, 109800 |
| 134934 | Achondroplasia, 100800 |
| 134934 | Cervical cancer, somatic, 603956 |
| 134934 | Colorectal cancer, somatic, 109800 |
| 134934 | Crouzon syndrome with acanthosis nigricans |
| 136132 | [Fish-odor syndrome], 602079 |
| 136836 | Fucosyltransferase-6 deficiency |
| 137164 | Myoclonic epilepsy, severe, of infancy, 607208 |
| 137164 | Epilepsy, childhood absence, 607681 |
| 137164 | Epilepsy, generalized, with febrile seizures plus, 604233 |
| 138033 | Diabetes mellitus, noninsulin-dependent, 125853 |
| 138040 | Cortisol resistance |
| 138190 | Diabetes mellitus, noninsulin-dependent |
| 138491 | Hyperekplexia and spastic paraparesis |
| 138491 | Startle disease, autosomal recessive |
| 138491 | Startle disease/hyperekplexia, autosomal dominant, 149400 |
| 138981 | Pulmonary alveolar proteinosis, 265120 |
| 139130 | Hypertension, essential, susceptibility to, 145500 |
| 139200 | Graves disease, susceptibility to, 3, 275000 |
| 139250 | Isolated growth hormone deficiency, Illig type with absent GH and |
| | Kowarski type with bioinactive GH |
| 141900 | HPFH, deletion type |
| 141900 | Heinz body anemias, beta- |
| 141900 | Methemoglobinemias, beta- |
| 141900 | Sickle cell anemia |
| 141900 | Thalassemias, beta- |
| 141900 | Erythremias, beta- |
| 142000 | Thalassemia due to Hb Lepore |
| 142000 | Thalassemia, delta- |
| 142200 | HPFH, nondeletion type A |
| 142250 | HPFH, nondeletion type G |
| 143100 | Huntington disease |
| 145260 | Pseudohypoaldosteronism, type II |
| 145981 | Hypocalciuric hypercalcemia, type II |
| 146738 | Cryptorchidism, idiopathic, 219050 |
| 147060 | Hyper-IgE syndrome |
| 147061 | Allergy and asthma susceptibility |
| 147141 | Leukemia, acute lymphoblastic |
| 147440 | Growth retardation with deafness and mental retardation |
| 147575 | Gastric cancer, 137215 |
| 147575 | Macrocytic anemia, refractory, of 5q-syndrome, 153550 |
| 147575 | Myelodysplastic syndrome, preleukemic |
| 147575 | Myelogenous leukemia, acute |
| 147575 | Nonsmall cell lung cancer |
| 147670 | Leprechaunism, 246200 |
| 147670 | Rabson-Mendenhall syndrome, 262190 |
| 147670 | Diabetes mellitus, insulin-resistant, with acanthosis nigricans |
| 147683 | Asthma, susceptibility to, 600807 |
| 147781 | Atopy, susceptibility to |
| 147840 | Malaria, cerebral, susceptibility to |
| 148065 | White sponge nevus, 193900 |
| 148080 | Ichthyosis, cyclic, with epidermolytic hyperkeratosis, 607602 |
| 148080 | Nevus, epidermal, epidermolytic hyperkeratotic type, 600648 |
| 148080 | Epidermolytic hyperkeratosis, 113800 |
| 148500 | Tylosis with esophageal cancer |
| 150200 | [Placental lactogen deficiency] |
| 150292 | Epidermolysis bullosa, Herlitz junctional type, 226700 |
| 150292 | Epidermolysis bullosa, generalized atrophic benign, 226650 |
| 150310 | Epidermolysis bullosa, Herlitz junctional type, 226700 |
| 150310 | Epidermolysis bullosa, generalized atrophic benign, 226650 |
| 151440 | Leukemia, T-cell acute lymphoblastoid |
| 151460 | Severe combined immunodeficiency due to PTPRC deficiency |
| 151460 | Multiple sclerosis, susceptibility to, 126200 |
| 151670 | Hepatic lipase deficiency |
| 153455 | Cutis laxa, recessive, type I, 219100 |
| 154275 | Malignant hyperthermia susceptibility 2 |
| 154400 | Acrofacial dysostosis, Nager type |
| 154870 | Keutel syndrome, 245150 |
| 155555 | [Red hair/fair skin] |
| 155555 | UV-induced skin damage, vulnerability to |
| 156100 | Meningioma, 607174 |
| 157700 | Mitral valve prolapse, familial |
| 159991 | Myopathy, centronuclear, 160150 |
| 159991 | Becker muscular dystrophy modifier, 310200 |
| 161561 | BCG and salmonella infection, disseminated, 209950 |
| 162000 | Hyperuricemic nephropathy, familial juvenile |
| 162080 | Retinitis pigmentosa, autosomal dominant |
| 162100 | Neuralgic amyotrophy with predilection for brachial plexus |
| 163000 | Capillary malformations, hereditary |
| 163890 | Parkinson disease, familial, 601508 |
| 164690 | Leukemia, acute myeloid, with eosinophilia |
| 164770 | Myeloid malignancy, predisposition to |
| 164920 | Gastrointestinal stromal tumors |
| 164920 | Germ cell tumors, 273300 |
| 164920 | Mast cell leukemia |
| 164920 | Mastocytosis with associated hematologic disorder |
| 164920 | Piebaldism |
| 164953 | Liposarcoma |
| 168860 | Patella aplasia or hypoplasia |
| 170650 | Periodontitis, juvenile |
| 171190 | Hypertension, essential, 145500 |
| 172471 | Glycogenosis, hepatic, autosomal |
| 173410 | Myelomonocytic leukemia, chronic |
| 173410 | Myeloproliferative disorder with eosinophilia, 131440 |
| 173490 | Gastrointestinal stromal tumor, somatic, 606764 |
| 173490 | Hypereosinophilic syndrome, idiopathic, 607685 |
| 173610 | Platelet al.pha/delta storage pool deficiency |
| 173910 | Polycystic kidney disease, adult, type II |
| 176260 | Episodic ataxia/myokymia syndrome, 160120 |
| 176730 | MODY, one form, 125850 Hyperproinsulinemia, familial |
| 176730 | Diabetes mellitus, rare form |
| 176885 | Insulin resistance, susceptibility to |
| 176960 | Pituitary tumor, invasive |
| 177060 | Polycystic liver disease, 174050 |
| 179095 | Male infertility |
| 179502 | Lymphocytic leukemia, acute T-cell |
| 179820 | [Hyperproreninemia] |
| 180020 | Retinal cone dystrophy-1 |
| 180071 | Retinitis pigmentosa, autosomal recessive |
| 180072 | Night blindness, congenital stationary, type 3, 163500 |
| 180072 | Retinitis pigmentosa, autosomal recessive |
| 181460 | Schistosoma mansoni infection, susceptibility/resistance to |
| 181800 | Scoliosis, idiopathic 1 |
| 182380 | Glucose/galactose malabsorption, 606824 |
| 182381 | Renal glucosuria, 233100 |
| 182390 | Seizures, afebrile, 604233 |
| 182390 | Seizures, benign familial neonatal-infantile, 604233 |
| 182600 | Spastic paraplegia-3A |
| 186880 | Leukemia/lymphoma, T-cell |
| 188070 | Bleeding disorder due to defective thromboxane A2 receptor |
| 188826 | Sorsby fundus dystrophy, 136900 |
| 188830 | Myxoma, intracardiac, 255960 |
| 188830 | Pigmented adrenocortical disease, primary isolated, 160980 |
| 188830 | Thyroid carcinoma, papillary, 188550 |
| 188830 | Carney complex, type 1, 160980 |
| 190020 | Bladder cancer, 109800 |
| 190040 | Giant-cell fibroblastoma |
| 190040 | Meningioma, SIS-related |
| 190040 | Dermatofibrosarcoma protuberans |
| 190195 | Ichthyosiform erythroderma, congenital, 242100 |
| 190195 | Ichthyosis, lamellar, autosomal recessive, 242300 |
| 190195 | Self-healing collodion baby, 242300 |
| 190450 | Hemolytic anemia due to triosephosphate isomerase deficiency |
| 191043 | Arthrogryposis multiplex congenita, distal, type 2B, 601680 |
| 191045 | Cardiomyopathy, dilated, 1D, 601494 |
| 191045 | Cardiomyopathy, familial hypertrophic, 2, 115195 |
| 191290 | Segawa syndrome, recessive |
| 191306 | Hemangioma, capillary infantile, somatic, 602089 |
| 192974 | Glycoprotein Ia deficiency |
| 192974 | Neonatal alloimmune thrombocytopenia |
| 194071 | Wilms tumor, type 2 |
| 194071 | Adrenocortical carcinoma, hereditary, 202300 |
| 194190 | Wolf-Hirschhorn syndrome |
| 200990 | Acrocallosal syndrome |
| 204500 | Ceroid-lipofuscinosis, neuronal 2, classic late infantile |
| 216950 | C1r/C1s deficiency, combined |
| 218040 | Costello syndrome |
| 221820 | Gliosis, familial progressive subcortical |
| 226450 | Epidermolysis bullosa inversa, junctional |
| 231670 | Glutaricaciduria, type I |
| 231680 | Glutaricaciduria, type IIA |
| 234000 | Factor XII deficiency |
| 235800 | [Histidinemia] |
| 248310 | Plasmodium falciparum parasitemia, intensity of |
| 252500 | Mucolipidosis II |
| 252500 | Mucolipidosis III |
| 252800 | Mucopolysaccharidosis Ih |
| 252800 | Mucopolysaccharidosis Ih/s |
| 252800 | Mucopolysaccharidosis Is |
| 253000 | Mucopolysaccharidosis IVA |
| 256540 | Galactosialidosis |
| 264470 | Adrenoleukodystrophy, pseudoneonatal |
| 266100 | Epilepsy, pyridoxine-dependent |
| 271900 | Canavan disease |
| 272750 | GM2-gangliosidosis, AB variant |
| 273300 | Male germ cell tumor |
| 276700 | Tyrosinemia, type I |
| 277600 | Weill-Marchesani syndrome |
| 300039 | Deafness, X-linked 3, conductive, with stapes fixation, 304400 |
| 300135 | Anemia, sideroblastic, with ataxia, 301310 |
| 300142 | Mental retardation, X-linked 30 |
| 300307 | Cleft palate with ankyloglossia, 303400 |
| 300324 | Mental retardation, X-linked-53 |
| 300390 | Choroideremia, 303100 |
| 300405 | Mental retardation, profound |
| 301201 | Amelogenesis imperfecta-3, hypoplastic type |
| 301835 | Arts syndrome |
| 305450 | FG syndrome |
| 309600 | Allan-Herndon syndrome |
| 309605 | Mental retardation, X-linked, syndromic-4, with congenital |
| | contractures and low fingertip arches |
| 311850 | Phosphoribosyl pyrophosphate synthetase-related gout |
| 314200 | [Euthyroidal hyper-and hypothyroxinemia] |
| 314580 | Wieacker-Wolff syndrome |
| 600031 | [Chitotriosidase deficiency] |
| 600098 | Ovarian carcinoma |
| 600119 | Muscular dystrophy, Duchenne-like, type 2 |
| 600119 | Muscular dystrophy, limb-girdle, type 2D |
| 600119 | Adhalinopathy, primary |
| 600228 | Pseudohypoaldosteronism, type I, 264350 |
| 600243 | Temperature-sensitive apoptosis |
| 600258 | Colorectal cancer, hereditary nonpolyposis, type 3, 114500 |
| 600276 | Cerebral arteriopathy with subcortical infarcts and |
| | leukoencephalopathy, 125310 |
| 600281 | MODY, type I, 125850 |
| 600281 | Diabetes mellitus, noninsulin-dependent, 125853 |
| 600320 | Diabetes mellitus, insulin-dependent, 5 |
| 600374 | Bardet-Biedl syndrome 4, 209900 |
| 600429 | [Ii blood group, 110800] |
| 600525 | Trichodontoosseous syndrome, 190320 |
| 600555 | Mycobacterial infection, atypical, familial disseminated, 209950 |
| 600555 | STAT1 deficiency, complete |
| 600618 | Leukemia, acute lymphoblastic |
| 600638 | Fibrosis of extraocular muscles, congenital, 3 |
| 600638 | Fibrosis, congenital, of vertically acting extraocular muscles |
| 600681 | Long QT syndrome-7, 170390 |
| 600759 | Alzheimer disease-4, 104300 |
| 600760 | Liddle syndrome, 177200 |
| 600760 | Pseudohypoaldosteronism, type I, 264350 |
| 600761 | Liddle syndrome, 177200 |
| 600761 | Pseudohypoaldosteronism, type I, 264350 |
| 600807 | Bronchial asthma |
| 600808 | Enuresis, nocturnal, 2 |
| 600850 | Schizophrenia, 181500 |
| 600856 | Beckwith-Wiedemann syndrome, 130650 |
| 600883 | Diabetes mellitus, insulin-dependent, 8 |
| 600900 | Muscular dystrophy, limb-girdle, type 2E, 604286 |
| 600957 | Persistent Mullerian duct syndrome, type I, 261550 |
| 600977 | Cone dystrophy, progressive |
| 600995 | Nephrotic syndrome, idiopathic, steroid-resistant |
| 601202 | Cataract, anterior polar-2 |
| 601238 | Cerebellar ataxia, Cayman type |
| 601240 | GAMT deficiency |
| 601284 | Hereditary hemorrhagic telangiectasia-2, 600376 |
| 601411 | Muscular dystrophy, limb-girdle, type 2F, 601287 |
| 601411 | Cardiomyopathy, dilated, 1L, 606685 |
| 601596 | Charcot-Marie-Tooth neuropathy, demyelinating |
| 601617 | Fundus albipunctatus, 136880 |
| 601652 | Glaucoma 1A, primary open angle, juvenile-onset, 137750 |
| 601652 | Glaucoma 1A, primary open angle, recessive |
| 601652 | Glaucoma, early-onset, digenic |
| 601680 | Arthrogryposis multiplex congenita, distal, type 2B |
| 601692 | Corneal dystrophy, Avellino type |
| 601692 | Corneal dystrophy, Groenouw type I, 121900 |
| 601692 | Corneal dystrophy, Reis-Bucklers type, 121900 |
| 601692 | Corneal dystrophy, lattice type I, 122200 |
| 601692 | Corneal dystrophy, lattice type IIIA |
| 601768 | Leukemia, acute myeloid |
| 601769 | Osteoporosis, involutional |
| 601769 | Rickets, vitamin D-resistant, 277440 |
| 601837 | LIG4 syndrome, 606593 |
| 601843 | Hypothyroidism, congenital, 274400 |
| 601844 | Pseudohypoaldosteronism type II |
| 601846 | Muscular dystrophy with rimmed vacuoles |
| 601894 | Glomerulopathy, fibronectin |
| 601900 | Multiple myeloma |
| 601975 | Ectodermal dysplasia/skin fragility syndrome, 604536 |
| 602018 | Hirschsprung disease, 142623 |
| 602049 | Neutrophil immunodeficiency syndrome |
| 602063 | Transaldolase deficiency, 606003 |
| 602066 | Convulsions, infantile and paroxysmal choreoathetosis |
| 602087 | Arrhythmogenic right ventricular dysplasia-4 |
| 602089 | Hemangioma, capillary infantile |
| 602096 | Alzheimer disease-5 |
| 602104 | Cherubism, 118400 |
| 602116 | Glioma |
| 602121 | Deafness, autosomal dominant 1, 124900 |
| 602216 | Melanoma, malignant sporadic |
| 602216 | Pancreatic cancer, sporadic |
| 602216 | Peutz-Jeghers syndrome, 175200 |
| 602229 | Waardenburg-Shah syndrome, 277580 |
| 602229 | Waardenburg-Shah syndrome, neurologic variant |
| 602229 | Yemenite deaf-blind hypopigmentation syndrome, 601706 |
| 602279 | Oculopharyngeal muscular dystorphy, 164300 |
| 602279 | Oculopharyngeal muscular dystrophy, autosomal recessive, 257950 |
| 602290 | Muscular dystrophy, limb-girdle, type 2H, 254110 |
| 602402 | Lymphedema and ptosis, 153000 |
| 602402 | Lymphedema, hereditary II, 153200 |
| 602402 | Lymphedema-distichiasis syndrome, 153400 |
| 602402 | Yellow nail syndrome, 153300 |
| 602460 | Deafness, autosomal dominant 15, 602459 |
| 602477 | Convulsions, familial febrile, 2 |
| 602544 | Parkinson disease, juvenile, type 2, 600116 |
| 602574 | Deafness, autosomal dominant 12, 601842 |
| 602574 | Deafness, autosomal dominant 8, 601543 |
| 602574 | Deafness, autosomal recessive 21, 603629 |
| 602631 | Lung cancer, 211980 |
| 602631 | Rhabdomyosarcoma, 268210 |
| 602631 | Breast cancer, 114480 |
| 602700 | Colorectal cancer, 114500 |
| 602723 | Psoriasis, susceptibility to, 177900 |
| 602783 | Spastic paraplegia-7 |
| 603030 | Endotoxin hyporesponsiveness |
| 603075 | Macular degeneration, age-related, 1 |
| 603113 | Lung cancer, 211980 |
| 603175 | Schizophrenia, 181500 |
| 603221 | Myopia-3 |
| 603288 | Cornea plana congenita, recessive, 217300 |
| 603345 | Renal tubular acidosis, proximal, with ocular abnormalities, 604278 |
| 603377 | Carnitine deficiency, systemic primary, 212140 |
| 603386 | Thyroid carcinoma, nonmedullary, with cell oxyphilia |
| 603426 | Advanced sleep phase syndrome, familial, 604348 |
| 603513 | Spastic cerebral palsy, symmetric |
| 603516 | Spinocerebellar ataxia-10 |
| 603590 | Meningioma |
| 603593 | Lysinuric protein intolerance, 222700 |
| 603644 | Hepatic failure, early onset, and neurologic disorder |
| 603694 | Diabetes mellitus, noninsulin-dependent, 125853 |
| 603743 | Schizophrenia, 181500 |
| 603795 | Charcot-Marie-Tooth disease, type 1C, 601098 |
| 603860 | Medullary cystic kidney disease 2 |
| 603964 | Deafness, autosomal dominant 16 |
| 603967 | Hyperkalemic periodic paralysis, 170500 |
| 603967 | Hypokalemic periodic paralysis, 170400 |
| 603967 | Myotonia congenita, atypical, acetazolamide-responsive, 170500 |
| 603967 | Paramyotonia congenita, 168300 |
| 603967 | Cramps, familial, potassium-aggravated |
| 604025 | Colorectal cancer, 114500 |
| 604061 | Leukemia, acute myeloid, therapy-related |
| 604061 | Ovarian carcinoma |
| 604103 | Muscular dystrophy, limb-girdle, type 1A, 159000 |
| 604210 | Leber congenital amaurosis, 204000 |
| 604210 | Retinitis pigmentosa-12, autosomal recessive, 600105 |
| 604272 | Cardioencephalomyopathy, fatal infantile, due to cytochrome c oxidase |
| | deficiency, 604377 |
| 604283 | Camptodactyly-arthropathy-coxa vara-pericarditis syndrome, 208250 |
| 604313 | Galactokinase deficiency with cataracts, 230200 |
| 604325 | Spinocerebellar ataxia 12, 604326 |
| 604332 | Leukemia, acute myeloid |
| 604403 | Convulsions, familial febrile, 3 |
| 604443 | Myelodysplastic syndrome |
| 604443 | Myelogenous leukemia, acute |
| 604485 | Retinitis pigmentosa, late onset, 268000 |
| 604485 | Enhanced S-cone syndrome, 268100 |
| 604489 | Alpha-methylacyl-CoA racemase deficiency |
| 604614 | Adrenocorticotropic hormone deficiency, 201400 |
| 604717 | Deafness autosomal dominant 26 |
| 604717 | Deafness, autosomal dominant 20 |
| 604766 | Nephrotic syndrome, steroid-resistant, 600995 |
| 604767 | Esophageal squamous cell carcinoma, 133239 |
| 604781 | Ichthyosis, nonlamellar and nonerythrodermic, congenital |
| 605010 | Netherton syndrome, 256500 |
| 605010 | Atopy, 147050 |
| 605205 | Hypercalciuria, absorptive, susceptibility to, 143870 |
| 605232 | Pseudohypoaldosteronism, type IIC |
| 605248 | Mucolipidosis IV, 252650 |
| 605257 | Immunodeficiency with hyper-IgM, type 2, 605258 |
| 605268 | Huntington disease-like 2, 606438 |
| 605270 | Sanfilippo syndrome, type A, 252900 |
| 605286 | Diabetes mellitus, non-insulin dependent, 1, 601283 |
| 605370 | Leukemia, juvenile myelomonocytic |
| 605423 | Gonadal dysgenesis, 46XY, partial, with minifascicular neuropathy, |
| | 607080 |
| 605429 | [Deafness, nonsyndromic, modifier 1] |
| 605463 | Radiation sensitivity/chromosome instability syndrome, autosomal |
| | dominant |
| 605472 | Usher syndrome, type 2C |
| 605481 | Microcephaly, primary autosomal recessive, 5, 251200 |
| 605544 | Fibromatosis, gingival, 2, 135300 |
| 605549 | Cone-rod dystrophy 8 |
| 605583 | Deafness, autosomal dominant 25 |
| 605598 | Diabetes mellitus, insulin-dependent, 18 |
| 605751 | Convulsions, benign familial infantile, 2 |
| 605779 | Nail dysplasia, isolated congenital |
| 605805 | Dermatitis, atopic, 603165 |
| 605809 | Myasthenia gravis, familial infantile, 1, 254210 |
| 605818 | Deafness, autosomal recessive 27 |
| 605828 | Epidermodysplasia verruciformis, 226400 |
| 605829 | Epidermodysplasia verruciformis, 226400 |
| 605841 | Narcolepsy, 161400 |
| 605845 | Dermatitis, atopic, 603165 |
| 605934 | Holoprosencephaly-6, 236100 |
| 606078 | Megakaryoblastic leukemia, acute |
| 606236 | Alveolar soft-part sarcoma, 606243 |
| 606257 | Stature QTL 12 |
| 606258 | Stature QTL 13 |
| 606263 | Paget disease of bone, 602080 |
| 606272 | Cystinosis, atypical nephropathic |
| 606272 | Cystinosis, late-onset juvenile or adolescent nephropathic, 219900 |
| 606272 | Cystinosis, nephropathic, 219800 |
| 606272 | Cystinosis, ocular nonnephropathic, 219750 |
| 606348 | Inflammatory bowel disease-5, 266600 |
| 606439 | Spastic paraplegia-3A, 182600 |
| 606482 | Charcot-Marie-Tooth disease, dominant intermediate 1 |
| 606521 | Microcephaly, Amish type, 607196 |
| 606531 | Asthma, susceptibility to, 600807 |
| 606579 | Systemic lupus erythematosus, vitiligo-related, susceptibility to, 1 |
| 606585 | Amelogenesis imperfecta 2, hypoplastic local, 104500 |
| 606675 | Inflammatory bowel disease-4, 266600 |
| 606718 | Atelosteogenesis II, 256050 |
| 606718 | Achondrogenesis Ib, 600972 |
| 606718 | Diastrophic dysplasia, 222600 |
| 606718 | Diastrophic dysplasia, broad bone-platyspondylic variant |
| 606718 | Epiphyseal dysplasia, multiple, 226900 |
| 606725 | Ceroid-lipofuscinosis, neuronal-6, variant late infantile, 601780 |
| 606800 | Glycogen storage disease II, 232300 |
| 606847 | Treacher Collins mandibulofacial dysostosis, 154500 |
| 606869 | GM2-gangliosidosis, several forms, 272800 |
| 606869 | Tay-Sachs disease, 272800 |
| 606869 | [Hex A pseudodeficiency], 272800 |
| 606885 | Acyl-CoA dehydrogenase, short-chain, deficiency of, 201470 |
| 606945 | Hypercholesterolemia, familial, 143890 |
| 607004 | Brachydactyly, type A1, 112500 |
| 607060 | Parkinson disease, 168600 |
| 607084 | Deafness, autosomal recessive 31 |
| 607139 | Fanconi anemia, complementation group A, 227650 |
| 607151 | Moyamoya disease 2 |
| 607199 | Popliteal pterygium syndrome, 119500 |
| 607199 | van der Woude syndrome, 119300 |
| 607248 | Glioma of brain, 137800 |
| 607252 | Schizophrenia, 181500 |
| 607254 | Schizophrenia, 181500 |
| 607324 | Polydactyly, postaxial, type A3 |
| 607393 | Hyperparathyroidism, familial primary, 145000 |
| 607393 | Hyperparathyroidism-jaw tumor syndrome, 145001 |
| 607393 | Parathyroid adenoma with cystic changes, 145001 |
| 607473 | Vitamin D-dependent coagulation defect 2 |
| 607516 | Migraine with or without aura, susceptibility to |
| 607516 | Migraine, familial hemiplegic |
| 607542 | Jervell and Lange-Nielsen syndrome, 220400 |
| 607542 | Long QT syndrome-1, 192500 |
| 607542 | Atrial fibrillation, familial, 607554 |
| 607690 | Anderson disease, 607689 |
| 607690 | Chylomicron retention disease with Marinesco-Sjogren syndrome, |
| | 607692 |
| 607690 | Chylomicron retention disease, 246700 |
| 607696 | Usher syndrome, type 1G, 606943 |

[1067] RACE Protocol for Recovery of Full-Length Genes

[1068] Partial cDNA clones can be made full-length by utilizing the rapid amplification of cDNA ends (RACE) procedure described in Frohman, M. A., et al., Proc. Nat'l. Acad. Sci. USA, 85:8998-9002 (1988). A cDNA clone missing either the 5′ or 3′ end can be reconstructed to include the absent base pairs extending to the translational start or stop codon, respectively. In some cases, cDNAs are missing the start codon of translation, therefor. The following briefly describes a modification of this original 5′ RACE procedure. Poly A+ or total RNA is reverse transcribed with Superscript II (Gibco/BRL) and an antisense or complementary primer specific to the cDNA sequence. The primer is removed from the reaction with a Microcon Concentrator (Amicon). The first-strand cDNA is then tailed with dATP and terminal deoxynucleotide transferase (Gibco/BRL). Thus, an anchor sequence is produced which is needed for PCR amplification. The second strand is synthesized from the dA-tail in PCR buffer, Taq DNA polymerase (Perkin-Elmer Cetus), an oligo-dT primer containing three adjacent restriction sites (XhoI, SalI and ClaI) at the 5′ end and a primer containing just these restriction sites. This double-stranded cDNA is PCR amplified for 40 cycles with the same primers as well as a nested cDNA-specific antisense primer. The PCR products are size-separated on an ethidium bromide-agarose gel and the region of gel containing cDNA products the predicted size of missing protein-coding DNA is removed. cDNA is purified from the agarose with the Magic PCR Prep kit (Promega), restriction digested with XhoI or SalI, and ligated to a plasmid such as pBluescript SKII (Stratagene) at XhoI and EcoRV sites. This DNA is transformed into bacteria and the plasmid clones sequenced to identify the correct protein-coding inserts. Correct 5′ ends are confirmed by comparing this sequence with the putatively identified homologue and overlap with the partial cDNA clone. Similar methods known in the art and/or commercial kits are used to amplify and recover 3′ ends.

[1069] Several quality-controlled kits are commercially available for purchase. Similar reagents and methods to those above are supplied in kit form from Gibco/BRL for both 5′ and 3′ RACE for recovery of full length genes. A second kit is available from Clontech which is a modification of a related technique, SLIC (single-stranded ligation to single-stranded cDNA), developed by Dumas et al., Nucleic Acids Res., 19:5227-32 (1991). The major differences in procedure are that the RNA is alkaline hydrolyzed after reverse transcription and RNA ligase is used to join a restriction site-containing anchor primer to the first-strand cDNA. This obviates the necessity for the dA-tailing reaction which results in a polyT stretch that is difficult to sequence past.

[1070] An alternative to generating 5′ or 3′ cDNA from RNA is to use cDNA library double-stranded DNA. An asymmetric PCR-amplified antisense cDNA strand is synthesized with an antisense cDNA-specific primer and a plasmid-anchored primer. These primers are removed and a symmetric PCR reaction is performed with a nested cDNA-specific antisense primer and the plasmid-anchored primer.

[1071] RNA Ligase Protocol for Generating the 5′ or 3′ End Sequences to Obtain Full Length Genes

[1072] Once a gene of interest is identified, several methods are available for the identification of the 5′ or 3′ portions of the gene which may not be present in the original cDNA plasmid. These methods include, but are not limited to, filter probing, clone enrichment using specific probes and protocols similar and identical to 5′ and 3′ RACE. While the full length gene may be present in the library and can be identified by probing, a useful method for generating the 5′ or 3′ end is to use the existing sequence information from the original cDNA to generate the missing information. A method similar to 5′ RACE is available for generating the missing 5′ end of a desired full-length gene. (This method was published by Fromont-Racine et al., Nucleic Acids Res., 21(7):1683-1684 (1993)). Briefly, a specific RNA oligonucleotide is ligated to the 5′ ends of a population of RNA presumably containing full-length gene RNA transcript and a primer set containing a primer specific to the ligated RNA oligonucleotide and a primer specific to a known sequence of the gene of interest, is used to PCR amplify the 5′ portion of the desired full length gene which may then be sequenced and used to generate the full length gene. This method starts with total RNA isolated from the desired source, poly A RNA may be used but is not a prerequisite for this procedure. The RNA preparation may then be treated with phosphatase if necessary to eliminate 5′ phosphate groups on degraded or damaged RNA which may interfere with the later RNA ligase step. The phosphatase if used is then inactivated and the RNA is treated with tobacco acid pyrophosphatase in order to remove the cap structure present at the 5′ ends of messenger RNAs. This reaction leaves a 5′ phosphate group at the 5′ end of the cap cleaved RNA which can then be ligated to an RNA oligonucleotide using T4 RNA ligase. This modified RNA preparation can then be used as a template for first strand cDNA synthesis using a gene specific oligonucleotide. The first strand synthesis-reaction can then be used as a template for PCR amplification of the desired 5′ end using a primer specific to the ligated RNA oligonucleotide and a primer specific to the known sequence of the gene of interest. The resultant product is then sequenced and analyzed to confirm that the 5′ end sequence belongs to the relevant gene.

[1073] The present invention also relates to vectors or plasmids which include such DNA sequences, as well as the use of the DNA sequences. The material deposited with the ATCC (e.g., as described in columns 2 and 3 of Table 1A, and/or as set forth in Table 1B) is a mixture of cDNA clones derived from a variety of human tissue and cloned in either a plasmid vector or a phage vector, as described, for example, in Table 1A. These deposits are referred to as “the deposits” herein. The deposited material includes cDNA clones corresponding to SEQ ID NO:X described, for example, in Table 1A and/or 1B (ATCC Deposit No:Z). A clone which is isolatable from the ATCC Deposits by use of a sequence listed as SEQ ID NO:X, may include the entire coding region of a human gene or in other cases such clone may include a substantial portion of the coding region of a human gene. Furthermore, although the sequence listing may in some instances list only a portion of the DNA sequence in a clone included in the ATCC Deposits, it is well within the ability of one skilled in the art to sequence the DNA included in a clone contained in the ATCC Deposits by use of a sequence (or portion thereof) described in, for example Tables 1A and/or 1B or 2, by procedures hereinafter further described, and others apparent to those skilled in the art.

[1074] Also provided in Table 1A is the name of the vector which contains the cDNA clone. Each vector is routinely used in the art. The following additional information is provided for convenience.

[1075] Vectors Lambda Zap (U.S. Pat. Nos. 5,128,256 and 5,286,636), Uni-Zap XR (U.S. Pat. Nos. 5,128,256 and 5,286,636), Zap Express (U.S. Pat. Nos. 5,128,256 and 5,286,636), pBluescript (pBS) (Short, J. M. et al., Nucleic Acids Res. 16:7583-7600 (1988); Alting-Mees, M. A. and Short, J. M., Nucleic Acids Res. 17:9494 (1989)) and pBK (Alting-Mees, M. A. et al., Strategies 5:58-61 (1992)) are commercially available from Stratagene Cloning Systems, Inc., 11011 N. Torrey Pines Road, La Jolla, Calif., 92037. pBS contains an ampicillin resistance gene and pBK contains a neomycin resistance gene. Phagemid pBS may be excised from the Lambda Zap and Uni-Zap XR vectors, and phagemid pBK may be excised from the Zap Express vector. Both phagemids may be transformed into E. coli strain XL-1 Blue, also available from Stratagene.

[1076] Vectors pSport1, pCMVSport 1.0, pCMVSport 2.0, pCMVSport 3.0, and pCMVSport 6 were obtained from Life Technologies, Inc., P.O. Box 6009, Gaithersburg, Md. 20897. All Sport vectors contain an ampicillin resistance gene and may be transformed into E. coli strain DH10B, also available from Life Technologies. See, for instance, Gruber, C. E., et al., Focus 15:59-(1993). Vector lafmid BA (Bento Soares, Columbia University, New York, N.Y.) contains an ampicillin resistance gene and can be transformed into E. coli strain XL-1 Blue. Vector pCR®2.1, which is available from Invitrogen, 1600 Faraday Avenue, Carlsbad, Calif. 92008, contains an ampicillin resistance gene and may be transformed into E. coli strain DH10B, available from Life Technologies. See, for instance, Clark, J. M., Nuc. Acids Res. 16:9677-9686 (1988) and Mead, D. et al., Bio/Technology 9: (1991).

[1077] The present invention also relates to the genes corresponding to SEQ ID NO:X, SEQ ID NO:Y, and/or the deposited clone (ATCC Deposit No:Z). The corresponding gene can be isolated in accordance with known methods using the sequence information disclosed herein. Such methods include preparing probes or primers from the disclosed sequence and identifying or amplifying the corresponding gene from appropriate sources of genomic material.

[1078] Also provided in the present invention are allelic variants, orthologs, and/or species homologs. Procedures known in the art can be used to obtain full-length genes, allelic variants, splice variants, full-length coding portions, orthologs, and/or species homologs of genes corresponding to SEQ ID NO:X or the complement thereof, polypeptides encoded by genes corresponding to SEQ ID NO:X or the complement thereof, and/or the cDNA contained in ATCC Deposit No:Z, using information from the sequences disclosed herein or the clones deposited with the ATCC. For example, allelic variants and/or species homologs may be isolated and identified by making suitable probes or primers from the sequences provided herein and screening a suitable nucleic acid source for allelic variants and/or the desired homologue.

[1079] The polypeptides of the invention can be prepared in any suitable manner. Such polypeptides include isolated naturally occurring polypeptides, recombinantly produced polypeptides, synthetically produced polypeptides, or polypeptides produced by a combination of these methods. Means for preparing such polypeptides are well understood in the art.

[1080] The polypeptides may be in the form of the secreted protein, including the mature form, or may be a part of a larger protein, such as a fusion protein (see below). It is often advantageous to include an additional amino acid sequence which contains secretory or leader sequences, pro-sequences, sequences which aid in purification, such as multiple histidine residues, or an additional sequence for stability during recombinant production.

[1081] The polypeptides of the present invention are preferably provided in an isolated form, and preferably are substantially purified. A recombinantly produced version of a polypeptide, including the secreted polypeptide, can be substantially purified using techniques described herein or otherwise known in the art, such as, for example, by the one-step method described in Smith and Johnson, Gene 67:31-40 (1988). Polypeptides of the invention also can be purified from natural, synthetic or recombinant sources using techniques described herein or otherwise known in the art, such as, for example, antibodies of the invention raised against the polypeptides of the present invention in methods which are well known in the art.

Mature Polypeptides

[1082] The present invention also encompasses mature forms of a polypeptide having the amino acid sequence of SEQ ID NO:Y and/or the amino acid sequence encoded by the cDNA in a deposited clone. Polynucleotides encoding the mature forms (such as, for example, the polynucleotide sequence in SEQ ID NO:X and/or the polynucleotide sequence contained in the cDNA of a deposited clone) are also encompassed by the invention. Moreover, fragments or variants of these polypeptides (such as, fragments as described herein, polypeptides at least 80%, 85%, 90%, 95%, 96%, 97%, 98%, 99%, or 100% identical to these polypeptides, or polypeptides encoded by a polynucleotide that hybridizes under stringent conditions to the complementary strand of the polynucleotide encoding these polypeptides) are also encompassed by the invention. In preferred embodiments, these fragments or variants retain one or more functional acitivities of the full-length or mature form of the polypeptide (e.g., biological activity (such as, for example, activity in detecting, preventing, treating and/or indicated disorders), antigenicity (ability to bind, or compete with a polypeptide of the invention for binding, to an anti-polypeptide of the invention antibody), immunogenicity (ability to generate antibody which binds to a specific polypeptide of the invention), ability to form multimers with polypeptides of the invention, and ability to bind to a receptor or ligand for a polypeptide of the invention). Antibodies that bind the polypeptides of the invention, and polynucleotides encoding these polypeptides are also encompassed by the invention.

[1083] According to the signal hypothesis, proteins secreted by mammalian cells have a signal or secretary leader sequence which is cleaved from the mature protein once export of the growing protein chain across the rough endoplasmic reticulum has been initiated. Most mammalian cells and even insect cells cleave secreted proteins with the same specificity. However, in some cases, cleavage of a secreted protein is not entirely uniform, which results in two or more mature species of the protein. Further, it has long been known that cleavage specificity of a secreted protein is ultimately determined by the primary structure of the complete protein, that is, it is inherent in the amino acid sequence of the polypeptide.

[1084] Methods for predicting whether a protein has a signal sequence, as well as the cleavage point for that sequence, are available. For instance, the method of McGeoch, Virus Res. 3:271-286 (1985), uses the information from a short N-terminal charged region and a subsequent uncharged region of the complete (uncleaved) protein. The method of von Heinje, Nucleic Acids Res. 14:4683-4690 (1986) uses the information from the residues surrounding the cleavage site, typically residues −13 to +2, where +1 indicates the amino terminus of the secreted protein. The accuracy of predicting the cleavage points of known mammalian secretory proteins for each of these methods is in the range of 75-80%. (von Heinje, supra.) However, the two methods do not always produce the same predicted cleavage point(s) for a given protein.

[1085] In the present case, the deduced amino acid sequence of the secreted polypeptide was analyzed by a computer program called SignalP (Henrik Nielsen et al., Protein Engineering 10:1-6 (1997)), which predicts the cellular location of a protein based on the amino acid sequence. As part of this computational prediction of localization, the methods of McGeoch and von Heinje are incorporated. The analysis of the amino acid sequences of the secreted proteins described herein by this program provided the results shown in Table 1A.

[1086] In specific embodiments, polypeptides of the invention comprise, or alternatively consist of, the predicted mature form of the polypeptide as delineated in columns 14 and 15 of Table 1A. Moreover, fragments or variants of these polypeptides (such as, fragments as described herein, polypeptides at least 80%, 85%, 90%, 95%, 96%, 97%, 98%, 99%, or 100% identical to these polypeptides, or polypeptides encoded by a polynucleotide that hybridizes under stringent conditions to the complementary strand of the polynucleotide encoding these polypeptides) are also encompassed by the invention. In preferred embodiments, these fragments or variants retain one or more functional acitivities of the full-length or mature form of the polypeptide (e.g., biological activity, antigenicity [ability to bind (or compete with a polypeptide of the invention for binding) to an anti-polypeptide of the invention antibody], immunogenicity (ability to generate antibody which binds to a specific polypeptide of the invention), ability to form multimers with polypeptides of the invention, and ability to bind to a receptor or ligand for a polypeptide of the invention). Antibodies that bind the polypeptides of the invention, and polynucleotides encoding these polypeptides are also encompassed by the invention.

[1087] Polynucleotides encoding proteins comprising, or consisting of, the predicted mature form of polypeptides of the invention (e.g., polynucleotides having the sequence of SEQ ID NO: X (Table 1A, column 5), the sequence delineated in columns 7 and 8 of Table 1A, and a sequence encoding the mature polypeptide delineated in columns 14 and 15 of Table 1A (e.g., the sequence of SEQ ID NO:X encoding the mature polypeptide delineated in columns 14 and 15 of Table 1A)) are also encompassed by the invention, as are fragments or variants of these polynucleotides (such as, fragments as described herein, polynucleotides at least 80%, 85%, 90%, 95%, 96%, 97%, 98%, 99%, or 100% identical to these polyncueotides, and nucleic acids which hybridizes under stringent conditions to the complementary strand of the polynucleotide).

[1088] As one of ordinary skill would appreciate, however, cleavage sites sometimes vary from organism to organism and cannot be predicted with absolute certainty. Accordingly, the present invention provides secreted polypeptides having a sequence shown in SEQ ID NO:Y which have an N-terminus beginning within 15 residues of the predicted cleavage point (i.e., having 1, 2, 3, 4, 5, 6, 7, 8, 9, 10, 11, 12, 13, 14, or 15 more or less contiguous residues of SEQ ID NO:Y at the N-terminus when compared to the predicted mature form of the polypeptide (e.g., the mature polypeptide delineated in columns 14 and 15 of Table 1A). Similarly, it is also recognized that in some cases, cleavage of the signal sequence from a secreted protein is not entirely uniform, resulting in more than one secreted species. These polypeptides, and the polynucleotides encoding such polypeptides, are contemplated by the present invention.

[1089] Moreover, the signal sequence identified by the above analysis may not necessarily predict the naturally occurring signal sequence. For example, the naturally occurring signal sequence may be further upstream from the predicted signal sequence. However, it is likely that the predicted signal sequence will be capable of directing the secreted protein to the ER. Nonetheless, the present invention provides the mature protein produced by expression of the polynucleotide sequence of SEQ ID NO:X and/or the polynucleotide sequence contained in the cDNA of a deposited clone, in a mammalian cell (e.g., COS cells, as desribed below). These polypeptides, and the polynucleotides encoding such polypeptides, are contemplated by the present invention.

Polynucleotide and Polypeptide Variants

[1090] The present invention is also directed to variants of the polynucleotide sequence disclosed in SEQ ID NO:X or the complementary strand thereto, nucleotide sequences encoding the polypeptide of SEQ ID NO:Y, the nucleotide sequence of SEQ ID NO:X that encodes the polypeptide sequence as defined in columns 12 and 15 of Table 1A, nucleotide sequences encoding the polypeptide sequence as defined in columns 14 and 15 of Table 1A, the nucleotide sequence of SEQ ID NO:X encoding the polypeptide sequence as defined in column 5 of Table 1B, nucleotide sequences encoding the polypeptide as defined in column 6 and column 7 of Table 1B, the nucleotide sequence as defined in columns 8 and 9 of Table 2, nucleotide sequences encoding the polypeptide encoded by the nucleotide sequence as defined in columns 8 and 9 of Table 2, the cDNA sequence contained in ATCC Deposit NO:Z, the nucleotide sequences encoding the polypeptide encoded by the cDNA sequence contained in ATCC Deposit NO:Z, and/or the nucleotide sequences encoding a mature (secreted) polypeptide encoded by the cDNA sequence contained in ATCC Deposit NO:Z.

[1091] The present invention also encompasses variants of the polypeptide sequence disclosed in SEQ ID NO:Y, the polypeptide as defined in columns 12 and 15 of Table 1A, the polypeptide sequence as defined in columns 6 and 7 of Table 1B, a polypeptide sequence encoded by the polynucleotide sequence in SEQ ID NO:X, a polypeptide sequence encoded by the nucleotide sequence as defined in columns 8 and 9 of Table 2, a polypeptide sequence encoded by the complement of the polynucleotide sequence in SEQ ID NO:X, the polypeptide sequence encoded by the cDNA sequence contained in ATCC Deposit NO:Z and/or a mature (secreted) polypeptide encoded by the cDNA sequence contained in ATCC Deposit NO:Z.

[1092] “Variant” refers to a polynucleotide or polypeptide differing from the polynucleotide or polypeptide of the present invention, but retaining essential properties thereof. Generally, variants are overall closely similar, and, in many regions, identical to the polynucleotide or polypeptide of the present invention.

[1093] Thus, one aspect of the invention provides an isolated nucleic acid molecule comprising, or alternatively consisting of, a polynucleotide having a nucleotide sequence selected from the group consisting of: (a) a nucleotide sequence described in SEQ ID NO:X or contained in the cDNA sequence of ATCC Deposit No:Z; (b) a nucleotide sequence in SEQ ID NO:X or the cDNA in ATCC Deposit No:Z which encodes the complete amino acid sequence of SEQ ID NO:Y or the complete amino acid sequence encoded by the cDNA in ATCC Deposit No:Z; (c) a nucleotide sequence in SEQ ID NO:X or the cDNA in ATCC Deposit No:Z which encodes a mature polypeptide (i.e., a secreted polypeptide (e.g., as delineated in columns 14 and 15 of Table 1A)); (d) a nucleotide sequence in SEQ ID NO:X or the cDNA sequence of ATCC Deposit No:Z, which encodes a biologically active fragment of a polypeptide; (e) a nucleotide sequence in SEQ ID NO:X or the cDNA sequence of ATCC Deposit No:Z, which encodes an antigenic fragment of a polypeptide; (f) a nucleotide sequence encoding a polypeptide comprising the complete amino acid sequence of SEQ ID NO:Y or the complete amino acid sequence encoded by the cDNA in ATCC Deposit No:Z; (g) a nucleotide sequence encoding a mature polypeptide of the amino acid sequence of SEQ ID NO:Y (i.e., a secreted polypeptide (e.g., as delineated in columns. 14 and 15 of Table 1A)) or a mature polypeptide of the amino acid sequence encoded by the cDNA in ATCC Deposit No:Z; (h) a nucleotide sequence encoding a biologically active fragment of a polypeptide having the complete amino acid sequence of SEQ ID NO:Y or the complete amino acid sequence encoded by the cDNA in ATCC Deposit No:Z; (i) a nucleotide sequence encoding an antigenic fragment of a polypeptide having the complete amino acid sequence of SEQ ID NO:Y or the complete amino acid sequence encoded by the cDNA in ATCC Deposit No:Z; and (j) a nucleotide sequence complementary to any of the nucleotide sequences in (a), (b), (c), (d), (e), (f), (g), (h), or (i) above.

[1094] The present invention is also directed to nucleic acid molecules which comprise, or alternatively consist of, a nucleotide sequence which is at least 80%, 85%, 90%, 95%, 96%, 97%, 98%, 99% or 100%, identical to, for example, any of the nucleotide sequences in (a), (b), (c), (d), (e), (f), (g), (h), (i), or (j) above, the nucleotide coding sequence in SEQ ID NO:X or the complementary strand thereto, the nucleotide coding sequence of the cDNA contained in ATCC Deposit No:Z or the complementary strand thereto, a nucleotide sequence encoding the polypeptide of SEQ ID NO:Y, a nucleotide sequence encoding a polypeptide sequence encoded by the nucleotide sequence in SEQ ID NO:X, a polypeptide sequence encoded by the complement of the polynucleotide sequence in SEQ ID NO:X, a nucleotide sequence encoding the polypeptide encoded by the cDNA contained in ATCC Deposit No:Z, the nucleotide coding sequence in SEQ ID NO:X as defined in columns 8 and 9 of Table 2 or the complementary strand thereto, a nucleotide sequence encoding the polypeptide encoded by the nucleotide sequence in SEQ ID NO:X as defined in columns 8 and 9 of Table 2 or the complementary strand thereto, the nucleotide sequence in SEQ ID NO:X encoding the polypeptide sequence as defined in columns 5 and 6 of Table 1B or the complementary strand thereto, nucleotide sequences encoding the polypeptide as defined in column 5 and 6 of Table 1B or the complementary strand thereto, and/or polynucleotide fragments of any of these nucleic acid molecules (e.g., those fragments described herein). Polynucleotides which hybridize to the complement of these nucleic acid molecules under stringent hybridization conditions or alternatively, under lower stringency conditions, are also encompassed by the invention, as are polypeptides encoded by these polynucleotides and nucleic acids.

[1095] In a preferred embodiment, the invention encompasses nucleic acid molecules which comprise, or alternatively, consist of a polynucleotide which hybridizes under stringent hybridization conditions, or alternatively, under lower stringency conditions, to a polynucleotide in (a), (b), (c), (d), (e), (f), (g), (h), or (i), above, as are polypeptides encoded by these polynucleotides. In another preferred embodiment, polynucleotides which hybridize to the complement of these nucleic acid molecules under stringent hybridization conditions, or alternatively, under lower stringency conditions, are also encompassed by the invention, as are polypeptides encoded by these polynucleotides.

[1096] In another embodiment, the invention provides a purified protein comprising, or alternatively consisting of, a polypeptide having an amino acid sequence selected from the group consisting of: (a) the complete amino acid sequence of SEQ ID NO:Y or the complete amino acid sequence encoded by the cDNA in ATCC Deposit No:Z; (b) the amino acid sequence of a mature (secreted) form of a polypeptide having the amino acid sequence of SEQ ID NO:Y (e.g., as delineated in columns 14 and 15 of Table 1A) or a mature form of the amino acid sequence encoded by the cDNA in ATCC Deposit No:Z mature; (c) the amino acid sequence of a biologically active fragment of a polypeptide having the complete amino acid sequence of SEQ ID NO:Y or the complete amino acid sequence encoded by the cDNA in ATCC Deposit No:Z; and (d) the amino acid sequence of an antigenic fragment of a polypeptide having the complete amino acid sequence of SEQ ID NO:Y or the complete amino acid sequence encoded by the cDNA in ATCC Deposit No:Z.

[1097] The present invention is also directed to proteins which comprise, or alternatively consist of, an amino acid sequence which is at least 80%, 85%, 90%, 95%, 96%, 97%, 98%, 99% or 100%, identical to, for example, any of the amino acid sequences in (a), (b), (c), or (d), above, the amino acid sequence shown in SEQ ID NO:Y, the amino acid sequence encoded by the cDNA contained in ATCC Deposit No:Z, the amino acid sequence of the polypeptide encoded by the nucleotide sequence in SEQ ID NO:X as defined in columns 8 and 9 of Table 2, the amino acid sequence as defined in column 5 and 6 of Table 1B, an amino acid sequence encoded by the nucleotide sequence in SEQ ID NO:X, and an amino acid sequence encoded by the complement of the polynucleotide sequence in SEQ ID NO:X. Fragments of these polypeptides are also provided (e.g., those fragments described herein). Further proteins encoded by polynucleotides which hybridize to the complement of the nucleic acid molecules encoding these amino acid sequences under stringent hybridization conditions or alternatively, under lower stringency conditions, are also encompassed by the invention, as are the polynucleotides encoding these proteins.

[1098] By a nucleic acid having a nucleotide sequence at least, for example, 95% “identical” to a reference nucleotide sequence of the present invention, it is intended that the nucleotide sequence of the nucleic acid is identical to the reference sequence except that the nucleotide sequence may include up to five point mutations per each 100 nucleotides of the reference nucleotide sequence encoding the polypeptide. In other words, to obtain a nucleic acid having a nucleotide sequence at least 95% identical to a reference nucleotide sequence, up to 5% of the nucleotides in the reference sequence may be deleted or substituted with another nucleotide, or a number of nucleotides up to 5% of the total nucleotides in the reference sequence may be inserted into the reference sequence. The query sequence may be an entire sequence referred to in Table 1B or 2 as the ORF (open reading frame), or any fragment specified as described herein.

[1099] As a practical matter, whether any particular nucleic acid molecule or polypeptide is at least 80%, 85%, 90%, 95%, 96%, 97%, 98% or 99% identical to a nucleotide sequence of the present invention can be determined conventionally using known computer programs. A preferred method for determining the best overall match between a query sequence (a sequence of the present invention) and a subject sequence, also referred to as a global sequence alignment, can be determined using the FASTDB computer program based on the algorithm of Brutlag et al. (Comp. App. Biosci. 6:237-245 (1990)). In a sequence alignment the query and subject sequences are both DNA sequences. An RNA sequence can be compared by converting U's to T's. The result of said global sequence alignment is expressed as percent identity. Preferred parameters used in a FASTDB alignment of DNA sequences to calculate percent identity are: Matrix=Unitary, k-tuple=4, Mismatch Penalty=1, Joining Penalty=30, Randomization Group Length=0, Cutoff Score=1, Gap Penalty=5, Gap Size Penalty 0.05, Window Size=500 or the length of the subject nucleotide sequence, whichever is shorter.

[1100] If the subject sequence is shorter than the query sequence because of 5′ or 3′ deletions, not because of internal deletions, a manual correction must be made to the results. This is because the FASTDB program does not account for 5′ and 3′ truncations of the subject sequence when calculating percent identity. For subject sequences truncated at the 5′ or 3′ ends, relative to the query sequence, the percent identity is corrected by calculating the number of bases of the query sequence that are 5′ and 3′ of the subject sequence, which are not matched/aligned, as a percent of the total bases of the query sequence. Whether a nucleotide is matched/aligned is determined by results of the FASTDB sequence alignment. This percentage is then subtracted from the percent identity, calculated by the above FASTDB program using the specified parameters, to arrive at a final percent identity score. This corrected score is what is used for the purposes of the present invention. Only bases outside the 5′ and 3′ bases of the subject sequence, as displayed by the FASTDB alignment, which are not matched/aligned with the query sequence, are calculated for the purposes of manually adjusting the percent identity score.

[1101] For example, a 90 base subject sequence is aligned to a 100 base query sequence to determine percent identity. The deletions occur at the 5′ end of the subject sequence and therefore, the FASTDB alignment does not show a matched/alignment of the first 10 bases at 5′ end. The 10 unpaired bases represent 10% of the sequence (number of bases at the 5′ and 3′ ends not matched/total number of bases in the query sequence) so 10% is subtracted from the percent identity score calculated by the FASTDB program. If the remaining 90 bases were perfectly matched the final percent identity would be 90%. In another example, a 90 base subject sequence is compared with a 100 base query sequence. This time the deletions are internal deletions so that there are no bases on the 5′ or 3′ of the subject sequence which are not matched/aligned with the query. In this case the percent identity calculated by FASTDB is not manually corrected. Once again, only bases 5′ and 3′ of the subject sequence which are not matched/aligned with the query sequence are manually corrected for. No other manual corrections are to be made for the purposes of the present invention.

[1102] By a polypeptide having an amino acid sequence at least, for example, 95% “identical” to a query amino acid sequence of the present invention, it is intended that the amino acid sequence of the subject polypeptide is identical to the query sequence except that the subject polypeptide sequence may include up to five amino acid alterations per each 100 amino acids of the query amino acid sequence. In other words, to obtain a polypeptide having an amino acid sequence at least 95% identical to a query amino acid sequence, up to 5% of the amino acid residues in the subject sequence may be inserted, deleted, (indels) or substituted with another amino acid. These alterations of the reference sequence may occur at the amino or carboxy terminal positions of the reference amino acid sequence or anywhere between those terminal positions, interspersed either individually among residues in the reference sequence or in one or more contiguous groups within the reference sequence.

[1103] As a practical matter, whether any particular polypeptide is at least 80%, 85%, 90%, 95%, 96%, 97%, 98% or 99% identical to, for instance, the amino acid sequence of a polypeptide referred to in Table 1A (e.g., the amino acid sequence delineated in columns 12 and 15) or a fragment thereof, Table 1B (e.g., the amino acid sequence identified in column 6) or a fragment thereof, Table 2 (e.g., the amino acid sequence of the polypeptide encoded by the polynucleotide sequence defined in columns 8 and 9 of Table 2) or a fragment thereof, the amino acid sequence of the polypeptide encoded by the nucleotide sequence in SEQ ID NO:X or a fragment thereof, or the amino acid sequence of the polypeptide encoded by cDNA contained in ATCC Deposit No:Z, or a fragment thereof, the amino acid sequence of a mature (secreted) polypeptide encoded by cDNA contained in ATCC Deposit No:Z, or a fragment thereof, can be determined conventionally using known computer programs. A preferred method for determining the best overall match between a query sequence (a sequence of the present invention) and a subject sequence, also referred to as a global sequence alignment, can be determined using the FASTDB computer program based on the algorithm of Brutlag et al. (Comp. App. Biosci. 6:237-245 (1990)). In a sequence alignment the query and subject sequences are either both nucleotide sequences or both amino acid sequences. The result of said global sequence alignment is expressed as percent identity. Preferred parameters used in a FASTDB amino acid alignment are: Matrix=PAM 0, k-tuple=2, Mismatch Penalty=1, Joining Penalty=20, Randomization Group Length=0, Cutoff Score=1, Window Size=sequence length, Gap Penalty=5, Gap Size Penalty=0.05, Window Size=500 or the length of the subject amino acid sequence, whichever is shorter.

[1104] If the subject sequence is shorter than the query sequence due to N- or C-terminal deletions, not because of internal deletions, a manual correction must be made to the results. This is because the FASTDB program does not account for N- and C-terminal truncations of the subject sequence when calculating global percent identity. For subject sequences truncated at the N- and C-termini, relative to the query sequence, the percent identity is corrected by calculating the number of residues of the query sequence that are N- and C-terminal of the subject sequence, which are not matched/aligned with a corresponding subject residue, as a percent of the total bases of the query sequence. Whether a residue is matched/aligned is determined by results of the FASTDB sequence alignment. This percentage is then subtracted from the percent identity, calculated by the above FASTDB program using the specified parameters, to arrive at a final percent identity score. This final percent identity score is what is used for the purposes of the present invention. Only residues to the N- and C-termini of the subject sequence, which are not matched/aligned with the query sequence, are considered for the purposes of manually adjusting the percent identity score. That is, only query residue positions outside the farthest N- and C-terminal residues of the subject sequence.

[1105] For example, a 90 amino acid residue subject sequence is aligned with a 100 residue query sequence to determine percent identity. The deletion occurs at the N-terminus of the subject sequence and therefore, the FASTDB alignment does not show a matching/alignment of the first 10 residues at the N-terminus. The 10 unpaired residues represent 10% of the sequence (number of residues at the N- and C-termini not matched/total number of residues in the query sequence) so 10% is subtracted from the percent identity score calculated by the FASTDB program. If the remaining 90 residues were perfectly matched the final percent identity would be 90%. In another example, a 90 residue subject sequence is compared with a 100 residue query sequence. This time the deletions are internal deletions so there are no residues at the N- or C-termini of the subject sequence which are not matched/aligned with the query. In this case the percent identity calculated by FASTDB is not manually corrected. Once again, only residue positions outside the N- and C-terminal ends of the subject sequence, as displayed in the FASTDB alignment, which are not matched/aligned with the query sequnce are manually corrected for. No other manual corrections are to made for the purposes of the present invention.

[1106] The polynucleotide variants of the invention may contain alterations in the coding regions, non-coding regions, or both. Especially preferred are polynucleotide variants containing alterations which produce silent substitutions, additions, or deletions, but do not alter the properties or activities of the encoded polypeptide. Nucleotide variants produced by silent substitutions due to the degeneracy of the genetic code are preferred. Moreover, polypeptide variants in which less than 50, less than 40, less than 30, less than 20, less than 10, or 5-50, 5-25, 5-10, 1-5, or 1-2 amino acids are substituted, deleted, or added in any combination are also preferred. Polynucleotide variants can be produced for a variety of reasons, e.g., to optimize codon expression for a particular host (change codons in the human mRNA to those preferred by a bacterial host such as E. coli).

[1107] Naturally occurring variants are called “allelic variants,” and refer to one of several alternate forms of a gene occupying a given locus on a chromosome of an organism. (Genes II, Lewin, B., ed., John Wiley & Sons, New York (1985)). These allelic variants can vary at either the polynucleotide and/or polypeptide level and are included in the present invention. Alternatively, non-naturally occurring variants may be produced by mutagenesis techniques or by direct synthesis.

[1108] Using known methods of protein engineering and recombinant DNA technology, variants may be generated to improve or alter the characteristics of the polypeptides of the present invention. For instance, one or more amino acids can be deleted from the N-terminus or C-terminus of the polypeptide of the present invention without substantial loss of biological function. As an example, Ron et al. (J. Biol. Chem. 268: 2984-2988 (1993)) reported variant KGF proteins having heparin binding activity even after deleting 3, 8, or 27 amino-terminal amino acid residues. Similarly, Interferon gamma exhibited up to ten times higher activity after deleting 8-10 amino acid residues from the carboxy terminus of this protein. (Dobeli et al., J. Biotechnology 7:199-216 (1988).)

[1109] Moreover, ample evidence demonstrates that variants often retain a biological activity similar to that of the naturally occurring protein. For example, Gayle and coworkers (J. Biol. Chem. 268:22105-22111 (1993)) conducted extensive mutational analysis of human cytokine IL-1a. They used random mutagenesis to generate over 3,500 individual IL-1a mutants that averaged 2.5 amino acid changes per variant over the entire length of the molecule. Multiple mutations were examined at every possible amino acid position. The investigators found that “[m]ost of the molecule could be altered with little effect on either [binding or biological activity].” In fact, only 23 unique amino acid sequences, out of more than 3,500 nucleotide sequences examined, produced a protein that significantly differed in activity from wild-type.

[1110] Furthermore, even if deleting one or more amino acids from the N-terminus or C-terminus of a polypeptide results in modification or loss of one or more biological functions, other biological activities may still be retained. For example, the ability of a deletion variant to induce and/or to bind antibodies which recognize the secreted form will likely be retained when less than the majority of the residues of the secreted form are removed from the N-terminus or C-terminus. Whether a particular polypeptide lacking N- or C-terminal residues of a protein retains such immunogenic activities can readily be determined by routine methods described herein and otherwise known in the art.

[1111] Thus, the invention further includes polypeptide variants which show a functional activity (e.g., biological activity) of the polypeptides of the invention. Such variants include deletions, insertions, inversions, repeats, and substitutions selected according to general rules known in the art so as have little effect on activity.

[1112] The present application is directed to nucleic acid molecules at least 80%, 85%, 90%, 95%, 96%, 97%, 98%, 99% or 100% identical to the nucleic acid sequences disclosed herein, (e.g., encoding a polypeptide having the amino acid sequence of an N and/or C terminal deletion), irrespective of whether they encode a polypeptide having functional activity. This is because even where a particular nucleic acid molecule does not encode a polypeptide having functional activity, one of skill in the art would still know how to use the nucleic acid molecule, for instance, as a hybridization probe or a polymerase chain reaction (PCR) primer. Uses of the nucleic acid molecules of the present invention that do not encode a polypeptide having functional activity include, inter alia, (1) isolating a gene or allelic or splice variants thereof in a cDNA library; (2) in situ hybridization (e.g., “FISH”) to metaphase chromosomal spreads to provide precise chromosomal location of the gene, as described in Verma et al., Human Chromosomes: A Manual of Basic Techniques, Pergamon Press, New York (1988); (3) Northern Blot analysis for detecting mRNA expression in specific tissues (e.g., normal or diseased tissues); and (4) in situ hybridization (e.g., histochemistry) for detecting mRNA expression in specific tissues (e.g., normal or diseased tissues).

[1113] Preferred, however, are nucleic acid molecules having sequences at least 80%, 85%, 90%, 95%, 96%, 97%, 98%, 99% or 100% identical to the nucleic acid sequences disclosed herein, which do, in fact, encode a polypeptide having functional activity. By a polypeptide having “functional activity” is meant, a polypeptide capable of displaying one or more known functional activities associated with a full-length (complete) protein and/or a mature (secreted) protein of the invention. Such functional activities include, but are not limited to, biological activity, antigenicity [ability to bind (or compete with a polypeptide of the invention for binding) to an anti-polypeptide of the invention antibody], immunogenicity (ability to generate antibody which binds to a specific polypeptide of the invention), ability to form multimers with polypeptides of the invention, and ability to bind to a receptor or ligand for a polypeptide of the invention.

[1114] The functional activity of the polypeptides, and fragments, variants and derivatives of the invention, can be assayed by various methods.

[1115] For example, in one embodiment where one is assaying for the ability to bind or compete with a full-length polypeptide of the present invention for binding to an anti-polypetide antibody, various immunoassays known in the art can be used, including but not limited to, competitive and non-competitive assay systems using techniques such as radioimmunoassays, ELISA (enzyme linked immunosorbent assay), “sandwich” immunoassays, immunoradiometric assays, gel diffusion precipitation reactions, immunodiffusion assays, in situ immunoassays (using colloidal gold, enzyme or radioisotope labels, for example), western blots, precipitation reactions, agglutination assays (e.g., gel agglutination assays, hemagglutination assays), complement fixation assays, immunofluorescence assays, protein A assays, and immunoelectrophoresis assays, etc. In one embodiment, antibody binding is detected by detecting a label on the primary antibody. In another embodiment, the primary antibody is detected by detecting binding of a secondary antibody or reagent to the primary antibody. In a further embodiment, the secondary antibody is labeled. Many means are known in the art for detecting binding in an immunoassay and are within the scope of the present invention.

[1116] In another embodiment, where a ligand is identified, or the ability of a polypeptide fragment, variant or derivative of the invention to multimerize is being evaluated, binding can be assayed, e.g., by means well-known in the art, such as, for example, reducing and non-reducing gel chromatography, protein affinity chromatography, and affinity blotting. See generally, Phizicky et al., Microbiol. Rev. 59:94-123 (1995). In another embodiment, the ability of physiological correlates of a polypeptide of the present invention to bind to a substrate(s) of the polypeptide of the invention can be routinely assayed using techniques known in the art.

[1117] In addition, assays described herein (see Examples) and otherwise known in the art may routinely be applied to measure the ability of polypeptides of the present invention and fragments, variants and derivatives thereof to elicit polypeptide related biological activity (either in vitro or in vivo). Other methods will be known to the skilled artisan and are within the scope of the invention.

[1118] Of course, due to the degeneracy of the genetic code, one of ordinary skill in the art will immediately recognize that a large number of the nucleic acid molecules having a sequence at least 80%, 85%, 90%, 95%, 96%, 97%, 98%, 99%, or 100% identical to, for example, the nucleic acid sequence of the cDNA contained in ATCC Deposit No:Z, the nucleic acid sequence referred to in Table 1B (SEQ ID NO:X), the nucleic acid sequence disclosed in Table 1A (e.g., the nucleic acid sequence delineated in columns 7 and 8), the nucleic acid sequence disclosed in Table 2 (e.g., the nucleic acid sequence delineated in columns 8 and 9) or fragments thereof, will encode polypeptides “having functional activity.” In fact, since degenerate variants of any of these nucleotide sequences all encode the same polypeptide, in many instances, this will be clear to the skilled artisan even without performing the above described comparison assay. It will be further recognized in the art that, for such nucleic acid molecules that are not degenerate variants, a reasonable number will also encode a polypeptide having functional activity. This is because the skilled artisan is fully aware of amino acid substitutions that are either less likely or not likely to significantly effect protein function (e.g., replacing one aliphatic amino acid with a second aliphatic amino acid), as further described below.

[1119] For example, guidance concerning how to make phenotypically silent amino acid substitutions is provided in Bowie et al., “Deciphering the Message in Protein Sequences: Tolerance to Amino Acid Substitutions,” Science 247:1306-1310 (1990), wherein the authors indicate that there are two main strategies for studying the tolerance of an amino acid sequence to change.

[1120] The first strategy exploits the tolerance of amino acid substitutions by natural selection during the process of evolution. By comparing amino acid sequences in different species, conserved amino acids can be identified. These conserved amino acids are likely important for protein function. In contrast, the amino acid positions where substitutions have been tolerated by natural selection indicates that these positions are not critical for protein function. Thus, positions tolerating amino acid substitution could be modified while still maintaining biological activity of the protein.

[1121] The second strategy uses genetic engineering to introduce amino acid changes at specific positions of a cloned gene to identify regions critical for protein function. For example, site directed mutagenesis or alanine-scanning mutagenesis (introduction of single alanine mutations at every residue in the molecule) can be used. See Cunningham and Wells, Science 244:1081-1085 (1989). The resulting mutant molecules can then be tested for biological activity.

[1122] As the authors state, these two strategies have revealed that proteins are surprisingly tolerant of amino acid substitutions. The authors further indicate which amino acid changes are likely to be permissive at certain amino acid positions in the protein. For example, most buried (within the tertiary structure of the protein) amino acid residues require nonpolar side chains, whereas few features of surface side chains are generally conserved. Moreover, tolerated conservative amino acid substitutions involve replacement of the aliphatic or hydrophobic amino acids Ala, Val, Leu and Ile; replacement of the hydroxyl residues Ser and Thr; replacement of the acidic residues Asp and Glu; replacement of the amide residues Asn and Gln, replacement of the basic residues Lys, Arg, and His; replacement of the aromatic residues Phe, Tyr, and Trp, and replacement of the small-sized amino acids Ala, Ser, Thr, Met, and Gly.

[1123] Besides conservative amino acid substitution, variants of the present invention include (i) substitutions with one or more of the non-conserved amino acid residues, where the substituted amino acid residues may or may not be one encoded by the genetic code, or (ii) substitutions with one or more of the amino acid residues having a substituent group, or (iii) fusion of the mature polypeptide with another compound, such as a compound to increase the stability and/or solubility of the polypeptide (for example, polyethylene glycol), (iv) fusion of the polypeptide with additional amino acids, such as, for example, an IgG Fc fusion region peptide, serum albumin (preferably human serum albumin) or a fragment thereof, or leader or secretory sequence, or a sequence facilitating purification, or (v) fusion of the polypeptide with another compound, such as albumin (including but not limited to recombinant albumin (see, e.g., U.S. Pat. No. 5,876,969, issued Mar. 2, 1999, EP Patent 0 413 622, and U.S. Pat. No. 5,766,883, issued Jun. 16, 1998, herein incorporated by reference in their entirety)). Such variant polypeptides are deemed to be within the scope of those skilled in the art from the teachings herein.

[1124] For example, polypeptide variants containing amino acid substitutions of charged amino acids with other charged or neutral amino acids may produce proteins with improved characteristics, such as less aggregation. Aggregation of pharmaceutical formulations both reduces activity and increases clearance due to the aggregate's immunogenic activity. See Pinckard et al., Clin. Exp. Immunol. 2:331-340 (1967); Robbins et al., Diabetes 36: 838-845 (1987); Cleland et al., Crit. Rev. Therapeutic Drug Carrier Systems 10:307-377 (1993).

[1125] A further embodiment of the invention relates to polypeptides which comprise the amino acid sequence of a polypeptide having an amino acid sequence which contains at least one amino acid substitution, but not more than 50 amino acid substitutions, even more preferably, not more than 40 amino acid substitutions, still more preferably, not more than 30 amino acid substitutions, and still even more preferably, not more than 20 amino acid substitutions from a polypeptide sequence disclosed herein. Of course it is highly preferable for a polypeptide to have an amino acid sequence which, for example, comprises the amino acid sequence of a polypeptide of SEQ ID NO:Y, the amino acid sequence of the mature (e.g., secreted) polypeptide of SEQ ID NO:Y, an amino acid sequence encoded by SEQ ID NO:X, an amino acid sequence encoded by the portion of SEQ ID NO:X as defined in columnns 8 and 9 of Table 2, an amino acid sequence encoded by the complement of SEQ ID NO:X, an amino acid sequence encoded by cDNA contained in ATCC Deposit No:Z, and/or the amino acid sequence of a mature (secreted) polypeptide encoded by cDNA contained in ATCC Deposit No:Z, or a fragment thereof, which contains, in order of ever-increasing preference, at least one, but not more than 10, 9, 8, 7, 6, 5, 4, 3, 2 or 1 amino acid substitutions.

[1126] In specific embodiments, the polypeptides of the invention comprise, or alternatively, consist of, fragments or variants of a reference amino acid sequence selected from: (a) the amino acid sequence of SEQ ID NO:Y or fragments thereof (e.g., the mature form and/or other fragments described herein); (b) the amino acid sequence encoded by SEQ ID NO:X or fragments thereof; (c) the amino acid sequence encoded by the complement of SEQ ID NO:X or fragments thereof; (d) the amino acid sequence encoded by the portion of SEQ ID NO:X as defined in columns 8 and 9 of Table 2 or fragments thereof; and (e) the amino acid sequence encoded by cDNA contained in ATCC Deposit No:Z or fragments thereof; wherein the fragments or variants have 1-5, 5-10, 5-25, 5-50, 10-50 or 50-150, amino acid residue additions, substitutions, and/or deletions when compared to the reference amino acid sequence. In preferred embodiments, the amino acid substitutions are conservative. Polynucleotides encoding these polypeptides are also encompassed by the invention.

Polynucleotide and Polypeptide Fragments

[1127] The present invention is also directed to polynucleotide fragments of the polynucleotides (nucleic acids) of the invention. In the present invention, a “polynucleotide fragment” refers to a polynucleotide having a nucleic acid sequence which, for example: is a portion of the cDNA contained in ATCC Deposit No:Z or the complementary strand thereto; is a portion of the polynucleotide sequence encoding the polypeptide encoded by the cDNA contained in ATCC Deposit No:Z or the complementary strand thereto; is a portion of the polynucleotide sequence encoding the mature (secreted) polypeptide encoded by the cDNA contained in ATCC Deposit No:Z or the complementary strand thereto; is a portion of a polynucleotide sequence encoding the mature amino acid sequence as defined in columns 12 and 15 of Table 1A or the complementary strand thereto; is a portion of a polynucleotide sequence encoding the amino acid sequence encoded by the region of SEQ ID NO:X as defined in columns 8 and 9 of Table 2 or the complementary strand thereto; is a portion of the polynucleotide sequence of SEQ ID NO:X as defined in columns 8 and 9 of Table 2 or the complementary strand thereto; is a portion of the polynucleotide sequence in SEQ ID NO:X or the complementary strand thereto; is a polynucleotide sequence encoding a portion of the polypeptide of SEQ ID NO:Y; is a polynucleotide sequence encoding a portion of a polypeptide encoded by SEQ ID NO:X; or is a polynucleotide sequence encoding a portion of a polypeptide encoded by the complement of the polynucleotide sequence in SEQ ID NO:X.

[1128] The polynucleotide fragments of the invention are preferably at least about 15 nt, and more preferably at least about 20 nt, still more preferably at least about 30 nt, and even more preferably, at least about 40 nt, at least about 50 nt, at least about 75 nt, or at least about 150 nt in length. A fragment “at least 20 nt in length,” for example, is intended to include 20 or more contiguous bases from the cDNA sequence contained in ATCC Deposit No:Z, or the nucleotide sequence shown in SEQ ID NO:X or the complementary stand thereto. In this context “about” includes the particularly recited value or a value larger or smaller by several (5, 4, 3, 2, or 1) nucleotides, at either terminus or at both termini. These nucleotide fragments have uses that include, but are not limited to, as diagnostic probes and primers as discussed herein. Of course, larger fragments (e.g., at least 160, 170, 180, 190, 200, 250, 500, 600, 1000, or 2000 nucleotides in length) are also encompassed by the invention.

[1129] Moreover, representative examples of polynucleotide fragments of the invention comprise, or alternatively consist of, a sequence from about nucleotide number 1-50, 51-100, 101-150, 151-200, 201-250, 251-300, 301-350, 351-400, 401-450, 451-500, 501-550, 551-600, 601-650, 651-700, 701-750, 751-800, 801-850, 851-900, 901-950, 951-1000, 1001-1050, 1051-1100, 1101-1150, 1151-1200, 1201-1250, 1251-1300, 1301-1350, 1351-1400, 1401-1450, 1451-1500, 1501-1550, 1551-1600, 1601-1650, 1651-1700, 1701-1750, 1751-1800, 1801-1850, 1851-1900, 1901-1950, 1951-2000, 2001-2050, 2051-2100, 2101-2150, 2151-2200, 2201-2250, 2251-2300, 2301-2350, 2351-2400, 2401-2450, 2451-2500, 2501-2550, 2551-2600, 2601-2650, 2651-2700, 2701-2750, 2751-2800, 2801-2850, 2851-2900, 2901-2950, 2951-3000, 3001-3050, 3051-3100, 3101-3150, 3151-3200, 3201-3250, 3251-3300, 3301-3350, 3351-3400, 3401-3450, 3451-3500, 3501-3550, 3551-3600, 3601-3650, 3651-3700, 3701-3750, 3751-3800, 3801-3850, 3851-3900, 3901-3950, 3951-4000, 4001-4050, 4051-4100, 4101-4150, 4151-4200, 4201-4250, 4251-4300, 4301-4350, 4351-4400, 4401-4450, 4451-4500, 4501-4550, 4551-4600, 4601-4650, 4651-4700, 4701-4750, 4751-4800, 4801-4850, 4851-4900, 4901-4950, 4951-5000, 5001-5050, 5051-5100, 5101-5150, 5151-5200, 5201-5250, 5251-5300, 5301-5350, 5351-5400, 5401-5450, 5451-5500, 5501-5550, 5551-5600, 5601-5650, 5651-5700, 5701-5750, 5751-5800, 5801-5850, 5851-5900, 5901-5950, 5951-6000, 6001-6050, 6051-6100, 6101-6150, 6151-6200, 6201-6250, 6251-6300, 6301-6350, 6351-6400, 6401-6450, 6451-6500, 6501-6550, 6551-6600, 6601-6650, 6651-6700, 6701-6750, 6751-6800, 6801-6850, 6851-6900, 6901-6950, 6951-7000, 7001-7050, 7051-7100, 7101-7150, 7151-7200, 7201-7250, 7251-7300 or 7301 to the end of SEQ ID NO:X, or the complementary strand thereto. In this context “about” includes the particularly recited range or a range larger or smaller by several (5, 4, 3, 2, or 1) nucleotides, at either terminus or at both termini. Preferably, these fragments encode a polypeptide which has a functional activity (e.g., biological activity). More preferably, these polynucleotides can be used as probes or primers as discussed herein. Polynucleotides which hybridize to one or more of these polynucleotides under stringent hybridization conditions or alternatively, under lower stringency conditions are also encompassed by the invention, as are polypeptides encoded by these polynucleotides.

[1130] Further representative examples of polynucleotide fragments of the invention comprise, or alternatively consist of, a sequence from about nucleotide number 1-50, 51-100, 101-150, 151-200, 201-250, 251-300, 301-350, 351-400, 401-450, 451-500, 501-550, 551-600, 601-650, 651-700, 701-750, 751-800, 801-850, 851-900, 901-950, 951-1000, 1001-1050, 1051-1100, 1101-1150, 1151-1200, 1201-1250, 1251-1300, 1301-1350, 1351-1400, 1401-1450, 1451-1500, 1501-1550, 1551-1600, 1601-1650, 1651-1700, 1701-1750, 1751-1800, 1801-1850, 1851-1900, 1901-1950, 1951-2000, 2001-2050, 2051-2100, 2101-2150, 2151-2200, 2201-2250, 2251-2300, 2301-2350, 2351-2400, 2401-2450, 2451-2500, 2501-2550, 2551-2600, 2601-2650, 2651-2700, 2701-2750, 2751-2800, 2801-2850, 2851-2900, 2901-2950, 2951-3000, 3001-3050, 3051-3100, 3101-3150, 3151-3200, 3201-3250, 3251-3300, 3301-3350, 3351-3400, 3401-3450, 3451-3500, 3501-3550, 3551-3600, 3601-3650, 3651-3700, 3701-3750, 3751-3800, 3801-3850, 3851-3900, 3901-3950, 3951-4000, 4001-4050, 4051-4100, 4101-4150, 4151-4200, 4201-4250, 4251-4300, 4301-4350, 4351-4400, 4401-4450, 4451-4500, 4501-4550, 4551-4600, 4601-4650, 4651-4700, 4701-4750, 4751-4800, 4801-4850, 4851-4900, 4901-4950, 4951-5000, 5001-5050, 5051-5100, 5101-5150, 5151-5200, 5201-5250, 5251-5300, 5301-5350, 5351-5400, 5401-5450, 5451-5500, 5501-5550, 5551-5600, 5601-5650, 5651-5700, 5701-5750, 5751-5800, 5801-5850, 5851-5900, 5901-5950, 5951-6000, 6001-6050, 6051-6100, 6101-6150, 6151-6200, 6201-6250, 6251-6300, 6301-6350, 6351-6400, 6401-6450, 6451-6500, 6501-6550, 6551-6600, 6601-6650, 6651-6700, 6701-6750, 6751-6800, 6801-6850, 6851-6900, 6901-6950, 6951-7000, 7001-7050, 7051-7100, 7101-7150, 7151-7200, 7201-7250, 7251-7300 or 7301 to the end of the cDNA sequence contained in ATCC Deposit No:Z, or the complementary strand thereto. In this context “about” includes the particularly recited range or a range larger or smaller by several (5, 4, 3, 2, or 1) nucleotides, at either terminus or at both termini. Preferably, these fragments encode a polypeptide which has a functional activity (e.g., biological activity). More preferably, these polynucleotides can be used as probes or primers as discussed herein. Polynucleotides which hybridize to one or more of these polynucleotides under stringent hybridization conditions or alternatively, under lower stringency conditions are also encompassed by the invention, as are polypeptides encoded by these polynucleotides.

[1131] In the present invention, a “polypeptide fragment” refers to an amino acid sequence which is a portion of the amino acid sequence contained in SEQ ID NO:Y, is a portion of the mature form of SEQ ID NO:Y as defined in columns 14 and 15 of Table 1A, a portion of an amino acid sequence encoded by the portion of SEQ ID NO:X as defined in columns 8 and 9 of Table 2, is a portion of an amino acid sequence encoded by the polynucleotide sequence of SEQ ID NO:X, is a portion of an amino acid sequence encoded by the complement of the polynucleotide sequence in SEQ ID NO:X, is a portion of the amino acid sequence of a mature (secreted) polypeptide encoded by the cDNA contained in ATCC Deposit No:Z, and/or is a portion of an amino acid sequence encoded by the cDNA contained in ATCC Deposit No:Z. Protein (polypeptide) fragments may be “free-standing,” or comprised within a larger polypeptide of which the fragment forms a part or region, most preferably as a single continuous region. Representative examples of polypeptide fragments of the invention, include, for example, fragments comprising, or alternatively consisting of, from about amino acid number 1-20, 21-40, 41-60, 61-80, 81-100, 101-120, 121-140, 141-160, 161-180, 181-200, 201-220, 221-240, 241-260, 261-280, 281-300, 301-320, 321-340, 341-360, 361-380, 381-400, 401-420, 421-440, 441-460, 461-480, 481-500, 501-520, 521-540, 541-560, 561-580, 581-600, 601-620, 621-640, 641-660, 661-680, 681-700, 701-720, 721-740, 741-760, 761-780, 781-800, 801-820, 821-840, 841-860, 861-880, 881-900, 901-920, 921-940, 941-960, 961-980, 981-1000, 1001-1020, 1021-1040, 1041-1060, 1061-1080, 1081-1100, 1101-1120, 1121-1140, 1141-1160, 1161-1180, 1181-1200, 1201-1220, 1221-1240, 1241-1260, 1261-1280, 1281-1300, 1301-1320, 1321-1340, 1341-1360, 1361-1380, 1381-1400, 1401-1420, 1421-1440, or 1441 to the end of the coding region of cDNA and SEQ ID NO: Y. In a preferred embodiment, polypeptide fragments of the invention include, for example, fragments comprising, or alternatively consisting of, from about amino acid number 1-20, 21-40, 41-60, 61-80, 81-100, 101-120, 121-140, 141-160, 161-180, 181-200, 201-220, 221-240, 241-260, 261-280, 281-300, 301-320, 321-340, 341-360, 361-380, 381-400, 401-420, 421-440, 441-460, 461-480, 481-500, 501-520, 521-540, 541-560, 561-580, 581-600, 601-620, 621-640, 641-660, 661-680, 681-700, 701-720, 721-740, 741-760, 761-780, 781-800, 801-820, 821-840, 841-860, 861-880, 881-900, 901-920, 921-940, 941-960, 961-980, 981-1000, 1001-1020, 1021-1040, 1041-1060, 1061-1080, 1081-1100, 1101-1120, 1121-1140, 1141-1160, 1161-1180, 1181-1200, 1201-1220, 1221-1240, 1241-1260, 1261-1280, 1281-1300, 1301-1320, 1321-1340, 1341-1360, 1361-1380, 1381-1400, 1401-1420, 1421-1440, or 1441 to the end of the coding region of SEQ ID NO:Y. Moreover, polypeptide fragments of the invention may be at least about 10, 15, 20, 25, 30, 35, 40, 45, 50, 55, 60, 65, 70, 75, 80, 85, 90, 100, 110, 120, 130, 140, or 150 amino acids in length. In this context “about” includes the particularly recited ranges or values, or ranges or values larger or smaller by several (5, 4, 3, 2, or 1) amino acids, at either extreme or at both extremes. Polynucleotides encoding these polypeptide fragments are also encompassed by the invention.

[1132] Even if deletion of one or more amino acids from the N-terminus of a protein results in modification of loss of one or more biological functions of the protein, other functional activities (e.g., biological activities, ability to multimerize, ability to bind a ligand) may still be retained. For example, the ability of shortened muteins to induce and/or bind to antibodies which recognize the complete or mature forms of the polypeptides generally will be retained when less than the majority of the residues of the complete or mature polypeptide are removed from the N-terminus. Whether a particular polypeptide lacking N-terminal residues of a complete polypeptide retains such immunologic activities can readily be determined by routine methods described herein and otherwise known in the art. It is not unlikely that a mutein with a large number of deleted N-terminal amino acid residues may retain some biological or immunogenic activities. In fact, peptides composed of as few as six amino acid residues may often evoke an immune response.

[1133] Accordingly, polypeptide fragments include the secreted protein as well as the mature form. Further preferred polypeptide fragments include the secreted protein or the mature form having a continuous series of deleted residues from the amino or the carboxy terminus, or both. For example, any number of amino acids, ranging from 1-60, can be deleted from the amino terminus of either the secreted polypeptide or the mature form. Similarly, any number of amino acids, ranging from 1-30, can be deleted from the carboxy terminus of the secreted protein or mature form. Furthermore, any combination of the above amino and carboxy terminus deletions are preferred. Similarly, polynucleotides encoding these polypeptide fragments are also preferred.

[1134] The present invention further provides polypeptides having one or more residues deleted from the amino terminus of the amino acid sequence of a polypeptide disclosed herein (e.g., a polypeptide of SEQ ID NO:Y, a polypeptide as defined in columns 12 and 15 of Table 1A, a polypeptide encoded by the polynucleotide sequence contained in SEQ ID NO:X or the complement thereof, a polypeptide encoded by the portion of SEQ ID NO:X as defined in columns 8 and 9 of Table 2, a polypeptide encoded by the cDNA contained in ATCC Deposit No:Z, and/or a mature polypeptide encoded by the cDNA contained in ATCC Deposit No:Z). In particular, N-terminal deletions may be described by the general formula m−q, where q is a whole integer representing the total number of amino acid residues in a polypeptide of the invention (e.g., the polypeptide disclosed in SEQ ID NO:Y, the mature (secreted) portion of SEQ ID NO:Y as defined in columns 14 and 15 of Table 1A, or the polypeptide encoded by the portion of SEQ ID NO:X as defined in columns 8 and 9 of Table 2), and m is defined as any integer ranging from 2 to q−6. Polynucleotides encoding these polypeptides are also encompassed by the invention.

[1135] The present invention further provides polypeptides having one or more residues from the carboxy terminus of the amino acid sequence of a polypeptide disclosed herein (e.g., a polypeptide of SEQ ID NO:Y, the mature (secreted) portion of SEQ ID NO:Y as defined in columns 14 and 15 of Table 1A, a polypeptide encoded by the polynucleotide sequence contained in SEQ ID NO:X, a polypeptide encoded by the portion of SEQ ID NO:X as defined in columns 8 and 9 of Table 2, a polypeptide encoded by the cDNA contained in ATCC Deposit No:Z, and/or a mature polypeptide encoded by the cDNA contained in ATCC Deposit No:Z). In particular, C-terminal deletions may be described by the general formula 1−n, where n is any whole integer ranging from 6 to q−1, and where n corresponds to the position of amino acid residue in a polypeptide of the invention. Polynucleotides encoding these polypeptides are also encompassed by the invention.

[1136] In addition, any of the above described N- or C-terminal deletions can be combined to produce a N- and C-terminal deleted polypeptide. The invention also provides polypeptides having one or more amino acids deleted from both the amino and the carboxyl termini, which may be described generally as having residues m-n of a polypeptide encoded by SEQ ID NO:X (e.g., including, but not limited to, the preferred polypeptide disclosed as SEQ ID NO:Y, the mature (secreted) portion of SEQ ID NO:Y as defined in columns 14 and 15 of Table 1A, and the polypeptide encoded by the portion of SEQ ID NO:X as defined in columns 8 and 9 of Table 2), the cDNA contained in ATCC Deposit No:Z, and/or the complement thereof, where n and m are integers as described above. Polynucleotides encoding these polypeptides are also encompassed by the invention.

[1137] Also as mentioned above, even if deletion of one or more amino acids from the C-terminus of a protein results in modification of loss of one or more biological functions of the protein, other functional activities (e.g., biological activities, ability to multimerize, ability to bind a ligand) may still be retained. For example the ability of the shortened mutein to induce and/or bind to antibodies which recognize the complete or mature forms of the polypeptide generally will be retained when less than the majority of the residues of the complete or mature polypeptide are removed from the C-terminus. Whether a particular polypeptide lacking C-terminal residues of a complete polypeptide retains such immunologic activities can readily be determined by routine methods described herein and otherwise known in the art. It is not unlikely that a mutein with a large number of deleted C-terminal amino acid residues may retain some biological or immunogenic activities. In fact, peptides composed of as few as six amino acid residues may often evoke an immune response.

[1138] The present application is also directed to proteins containing polypeptides at least 80%, 85%, 90%, 95%, 96%, 97%, 98% or 99% identical to a polypeptide sequence set forth herein. In preferred embodiments, the application is directed to proteins containing polypeptides at least 80%, 85%, 90%, 95%, 96%, 97%, 98% or 99% identical to polypeptides having the amino acid sequence of the specific N- and C-terminal deletions. Polynucleotides encoding these polypeptides are also encompassed by the invention.

[1139] Any polypeptide sequence encoded by, for example, the polynucleotide sequences set forth as SEQ ID NO:X or the complement thereof, (presented, for example, in Tables 1A and 2), or the cDNA contained in ATCC Deposit No:Z, may be analyzed to determine certain preferred regions of the polypeptide. For example, the amino acid sequence of a polypeptide encoded by a polynucleotide sequence of SEQ ID NO:X (e.g., the polypeptide of SEQ ID NO:Y and the polypeptide encoded by the portion of SEQ ID NO:X as defined in columnns 8 and 9 of Table 2) or the cDNA contained in ATCC Deposit No:Z may be analyzed using the default parameters of the DNASTAR computer algorithm (DNASTAR, Inc., 1228 S. Park St., Madison, Wis. 53715 USA; http://www.dnastar.com/).

[1140] Polypeptide regions that may be routinely obtained using the DNASTAR computer algorithm include, but are not limited to, Garnier-Robson alpha-regions, beta-regions, turn-regions, and coil-regions; Chou-Fasman alpha-regions, beta-regions, and turn-regions; Kyte-Doolittle hydrophilic regions and hydrophobic regions; Eisenberg alpha- and beta-amphipathic regions; Karplus-Schulz flexible regions; Emini surface-forming regions; and Jameson-Wolf regions of high antigenic index. Among highly preferred polynucleotides of the invention in this regard are those that encode polypeptides comprising regions that combine several structural features, such as several (e.g., 1, 2, 3 or 4) of the features set out above.

[1141] Additionally, Kyte-Doolittle hydrophilic regions and hydrophobic regions, Emini surface-forming regions, and Jameson-Wolf regions of high antigenic index (i.e., containing four or more contiguous amino acids having an antigenic index of greater than or equal to 1.5, as identified using the default parameters of the Jameson-Wolf program) can routinely be used to determine polypeptide regions that exhibit a high degree of potential for antigenicity. Regions of high antigenicity are determined from data by DNASTAR analysis by choosing values which represent regions of the polypeptide which are likely to be exposed on the surface of the polypeptide in an environment in which antigen recognition may occur in the process of initiation of an immune response.

[1142] Preferred polypeptide fragments of the invention are fragments comprising, or alternatively, consisting of, an amino acid sequence that displays a functional activity (e.g. biological activity) of the polypeptide sequence of which the amino acid sequence is a fragment. By a polypeptide displaying a “functional activity” is meant a polypeptide capable of one or more known functional activities associated with a full-length protein, such as, for example, biological activity, antigenicity, immunogenicity, and/or multimerization, as described herein.

[1143] Other preferred polypeptide fragments are biologically active fragments. Biologically active fragments are those exhibiting activity similar, but not necessarily identical, to an activity of the polypeptide of the present invention. The biological activity of the fragments may include an improved desired activity, or a decreased undesirable activity.

[1144] In preferred embodiments, polypeptides of the invention comprise, or alternatively consist of, one, two, three, four, five or more of the antigenic fragments of the polypeptide of SEQ ID NO:Y, or portions thereof. Polynucleotides encoding these polypeptides are also encompassed by the invention.

Epitopes and Antibodies

[1145] The present invention encompasses polypeptides comprising, or alternatively consisting of, an epitope of: the polypeptide sequence shown in SEQ ID NO:Y; a polypeptide sequence encoded by SEQ ID NO:X or the complementary strand thereto; the polypeptide sequence encoded by the portion of SEQ ID NO:X as defined in columns 8 and 9 of Table 2; the polypeptide sequence encoded by the cDNA contained in ATCC Deposit No:Z; or the polypeptide sequence encoded by a polynucleotide that hybridizes to the sequence of SEQ ID NO:X, the complement of the sequence of SEQ ID NO:X, the complement of a portion of SEQ ID NO:X as defined in columns 8 and 9 of Table 2, or the cDNA sequence contained in ATCC Deposit No:Z under stringent hybridization conditions or alternatively, under lower stringency hybridization as defined supra. The present invention further encompasses polynucleotide sequences encoding an epitope of a polypeptide sequence of the invention (such as, for example, the sequence disclosed in SEQ ID NO:X, or a fragment thereof), polynucleotide sequences of the complementary strand of a polynucleotide sequence encoding an epitope of the invention, and polynucleotide sequences which hybridize to the complementary strand under stringent hybridization conditions or alternatively, under lower stringency hybridization conditions defined supra.

[1146] The term “epitopes,” as used herein, refers to portions of a polypeptide having antigenic or immunogenic activity in an animal, preferably a mammal, and most preferably in a human. In a preferred embodiment, the present invention encompasses a polypeptide comprising an epitope, as well as the polynucleotide encoding this polypeptide. An “immunogenic epitope,” as used herein, is defined as a portion of a protein that elicits an antibody response in an animal, as determined by any method known in the art, for example, by the methods for generating antibodies described infra. (See, for example, Geysen et al., Proc. Natl. Acad. Sci. USA 81:3998-4002 (1983)). The term “antigenic epitope,” as used herein, is defined as a portion of a protein to which an antibody can immunospecifically bind its antigen as determined by any method well known in the art, for example, by the immunoassays described herein. Immunospecific binding excludes non-specific binding but does not necessarily exclude cross-reactivity with other antigens. Antigenic epitopes need not necessarily be immunogenic.

[1147] Fragments which function as epitopes may be produced by any conventional means. (See, e.g., Houghten, R. A., Proc. Natl. Acad. Sci. USA 82:5131-5135 (1985) further described in U.S. Pat. No. 4,631,211.)

[1148] In the present invention, antigenic epitopes preferably contain a sequence of at least 4, at least 5, at least 6, at least 7, more preferably at least 8, at least 9, at least 10, at least 11, at least 12, at least 13, at least 14, at least 15, at least 20, at least 25, at least 30, at least 40, at least 50, and, most preferably, between about 15 to about 30 amino acids. Preferred polypeptides comprising immunogenic or antigenic epitopes are at least 10, 15, 20, 25, 30, 35, 40, 45, 50, 55, 60, 65, 70, 75, 80, 85, 90, 95, or 100 amino acid residues in length. Additional non-exclusive preferred antigenic epitopes include the antigenic epitopes disclosed herein, as well as portions thereof. Antigenic epitopes are useful, for example, to raise antibodies, including monoclonal antibodies, that specifically bind the epitope. Preferred antigenic epitopes include the antigenic epitopes disclosed herein, as well as any combination of two, three, four, five or more of these antigenic epitopes. Antigenic epitopes can be used as the target molecules in immunoassays. (See, for instance, Wilson et al., Cell 37:767-778 (1984); Sutcliffe et al., Science 219:660-666 (1983)).

[1149] Non-limiting examples of epitopes of polypeptides that can be used to generate antibodies of the invention include a polypeptide comprising, or alternatively consisting of, at least one, two, three, four, five, six or more of the portion(s) of SEQ ID NO:Y specified in column 6 of Table 1B. These polypeptide fragments have been determined to bear antigenic epitopes of the proteins of the invention by the analysis of the Jameson-Wolf antigenic index which is included in the DNAStar suite of computer programs. By “comprise” it is intended that a polypeptide contains at least one, two, three, four, five, six or more of the portion(s) of SEQ ID NO:Y shown in column 6 of Table 1B, but it may contain additional flanking residues on either the amino or carboxyl termini of the recited portion. Such additional flanking sequences are preferably sequences naturally found adjacent to the portion; i.e., contiguous sequence shown in SEQ ID NO:Y. The flanking sequence may, however, be sequences from a heterolgous polypeptide, such as from another protein described herein or from a heterologous polypeptide not described herein. In particular embodiments, epitope portions of a polypeptide of the invention comprise one, two, three, or more of the portions of SEQ ID NO:Y shown in column 6 of Table 1B.

[1150] Similarly, immunogenic epitopes can be used, for example, to induce antibodies according to methods well known in the art. See, for instance, Sutcliffe et al., supra; Wilson et al., supra; Chow et al., Proc. Natl. Acad. Sci. USA 82:910-914; and Bittle et al., J. Gen. Virol. 66:2347-2354 (1985). Preferred immunogenic epitopes include the immunogenic epitopes disclosed herein, as well as any combination of two, three, four, five or more of these immunogenic epitopes. The polypeptides comprising one or more immunogenic epitopes may be presented for eliciting an antibody response together with a carrier protein, such as an albumin, to an animal system (such as rabbit or mouse), or, if the polypeptide is of sufficient length (at least about 25 amino acids), the polypeptide may be presented without a carrier. However, immunogenic epitopes comprising as few as 8 to 10 amino acids have been shown to be sufficient to raise antibodies capable of binding to, at the very least, linear epitopes in a denatured polypeptide (e.g., in Western blotting).

[1151] Epitope-bearing polypeptides of the present invention may be used to induce antibodies according to methods well known in the art including, but not limited to, in vivo immunization, in vitro immunization, and phage display methods. See, e.g., Sutcliffe et al., supra; Wilson et al., supra, and Bittle et al., J. Gen. Virol., 66:2347-2354 (1985). If in vivo immunization is used, animals may be immunized with free peptide; however, anti-peptide antibody titer may be boosted by coupling the peptide to a macromolecular carrier, such as keyhole limpet hemacyanin (KLH) or tetanus toxoid. For instance, peptides containing cysteine residues may be coupled to a carrier using a linker such as maleimidobenzoyl-N-hydroxysuccinimide ester (MBS), while other peptides may be coupled to carriers using a more general linking agent such as glutaraldehyde. Animals such as rabbits, rats and mice are immunized with either free or carrier-coupled peptides, for instance, by intraperitoneal and/or intradermal injection of emulsions containing about 100 μg of peptide or carrier protein and Freund's adjuvant or any other adjuvant known for stimulating an immune response. Several booster injections may be needed, for instance, at intervals of about two weeks, to provide a useful titer of anti-peptide antibody which can be detected, for example, by ELISA assay using free peptide adsorbed to a solid surface. The titer of anti-peptide antibodies in serum from an immunized animal may be increased by selection of anti-peptide antibodies, for instance, by adsorption to the peptide on a solid support and elution of the selected antibodies according to methods well known in the art.

[1152] As one of skill in the art will appreciate, and as discussed above, the polypeptides of the present invention (e.g., those comprising an immunogenic or antigenic epitope) can be fused to heterologous polypeptide sequences. For example, polypeptides of the present invention (including fragments or variants thereof), may be fused with the constant domain of immunoglobulins (IgA, IgE, IgG, IgM), or portions thereof (CH1, CH2, CH3, or any combination thereof and portions thereof, resulting in chimeric polypeptides. By way of another non-limiting example, polypeptides and/or antibodies of the present invention (including fragments or variants thereof) may be fused with albumin (including but not limited to recombinant human serum albumin or fragments or variants thereof (see, e.g., U.S. Pat. No. 5,876,969, issued Mar. 2, 1999, EP Patent 0 413 622, and U.S. Pat. No. 5,766,883, issued Jun. 16, 1998, herein incorporated by reference in their entirety)). In a preferred embodiment, polypeptides and/or antibodies of the present invention (including fragments or variants thereof) are fused with the mature form of human serum albumin (i.e., amino acids 1-585 of human serum albumin as shown in FIGS. 1 and 2 of EP Patent 0 322 094) which is herein incorporated by reference in its entirety. In another preferred embodiment, polypeptides and/or antibodies of the present invention (including fragments or variants thereof) are fused with polypeptide fragments comprising, or alternatively consisting of, amino acid residues 1-z of human serum albumin, where z is an integer from 369 to 419, as described in U.S. Pat. No. 5,766,883 herein incorporated by reference in its entirety. Polypeptides and/or antibodies of the present invention (including fragments or variants thereof) may be fused to either the N- or C-terminal end of the heterologous protein (e.g., immunoglobulin Fc polypeptide or human serum albumin polypeptide). Polynucleotides encoding fusion proteins of the invention are also encompassed by the invention.

[1153] Such fusion proteins as those described above may facilitate purification and may increase half-life in vivo. This has been shown for chimeric proteins consisting of the first two domains of the human CD4-polypeptide and various domains of the constant regions of the heavy or light chains of mammalian immunoglobulins. See, e.g., EP 394,827; Traunecker et al., Nature, 331:84-86 (1988). Enhanced delivery of an antigen across the epithelial barrier to the immune system has been demonstrated for antigens (e.g., insulin) conjugated to an FcRn binding partner such as IgG or Fc fragments (see, e.g., PCT Publications WO 96/22024 and WO 99/04813). IgG fusion proteins that have a disulfide-linked dimeric structure due to the IgG portion desulfide bonds have also been found to be more efficient in binding and neutralizing other molecules than monomeric polypeptides or fragments thereof alone. See, e.g., Fountoulakis et al., J. Biochem., 270:3958-3964 (1995). Nucleic acids encoding the above epitopes can also be recombined with a gene of interest as an epitope tag (e.g., the hemagglutinin (HA) tag or flag tag) to aid in detection and purification of the expressed polypeptide. For example, a system described by Janknecht et al. allows for the ready purification of non-denatured fusion proteins expressed in human cell lines (Janknecht et al., 1991, Proc. Natl. Acad. Sci. USA 88:8972-897). In this system, the gene of interest is subcloned into a vaccinia recombination plasmid such that the open reading frame of the gene is translationally fused to an amino-terminal tag consisting of six histidine residues. The tag serves as a matrix binding domain for the fusion protein. Extracts from cells infected with the recombinant vaccinia virus are loaded onto Ni2+ nitriloacetic acid-agarose column and histidine-tagged proteins can be selectively eluted with imidazole-containing buffers.

Fusion Proteins

[1154] Any polypeptide of the present invention can be used to generate fusion proteins. For example, the polypeptide of the present invention, when fused to a second protein, can be used as an antigenic tag. Antibodies raised against the polypeptide of the present invention can be used to indirectly detect the second protein by binding to the polypeptide. Moreover, because secreted proteins target cellular locations based on trafficking signals, polypeptides of the present invention which are shown to be secreted can be used as targeting molecules once fused to other proteins.

[1155] Examples of domains that can be fused to polypeptides of the present invention include not only heterologous signal sequences, but also other heterologous functional regions. The fusion does not necessarily need to be direct, but may occur through linker sequences.

[1156] In certain preferred embodiments, proteins of the invention are fusion proteins comprising an amino acid sequence that is an N and/or C-terminal deletion of a polypeptide of the invention. In preferred embodiments, the invention is directed to a fusion protein comprising an amino acid sequence that is at least 90%, 95%, 96%, 97%, 98% or 99% identical to a polypeptide sequence of the invention. Polynucleotides encoding these proteins are also encompassed by the invention.

[1157] Moreover, fusion proteins may also be engineered to improve characteristics of the polypeptide of the present invention. For instance, a region of additional amino acids, particularly charged amino acids, may be added to the N-terminus of the polypeptide to improve stability and persistence during purification from the host cell or subsequent handling and storage. Also, peptide moieties may be added to the polypeptide to facilitate purification. Such regions may be removed prior to final preparation of the polypeptide. The addition of peptide moieties to facilitate handling of polypeptides are familiar and routine techniques in the art.

[1158] As one of skill in the art will appreciate that, as discussed above, polypeptides of the present invention, and epitope-bearing fragments thereof, can be combined with heterologous polypeptide sequences. For example, the polypeptides of the present invention may be fused with heterologous polypeptide sequences, for example, the polypeptides of the present invention may be fused with the constant domain of immunoglobulins (IgA, IgE, IgG, IgM) or portions thereof (CH1, CH2, CH3, and any combination thereof, including both entire domains and portions thereof), or albumin (including, but not limited to, native or recombinant human albumin or fragments or variants thereof (see, e.g., U.S. Pat. No. 5,876,969, issued Mar. 2, 1999, EP Patent 0 413 622, and U.S. Pat. No. 5,766,883, issued Jun. 16, 1998, herein incorporated by reference in their entirety)), resulting in chimeric polypeptides. For example, EP-A-O 464 533 (Canadian counterpart 2045869) discloses fusion proteins comprising various portions of constant region of immunoglobulin molecules together with another human protein or part thereof. In many cases, the Fc part in a fusion protein is beneficial in therapy and diagnosis, and thus can result in, for example, improved pharmacokinetic properties (EP-A 0232 262). Alternatively, deleting the Fc part after the fusion protein has been expressed, detected, and purified, would be desired. For example, the Fc portion may hinder therapy and diagnosis if the fusion protein is used as an antigen for immunizations. In drug discovery, for example, human proteins, such as hIL-5, have been fused with Fc portions for the purpose of high-throughput screening assays to identify antagonists of hIL-5. See, D. Bennett et al., J. Molecular Recognition 8:52-58 (1995); K. Johanson et al., J. Biol. Chem. 270:9459-9471 (1995).

[1159] Moreover, the polypeptides of the present invention can be fused to marker sequences, such as a polypeptide which facilitates purification of the fused polypeptide. In preferred embodiments, the marker amino acid sequence is a hexa-histidine peptide, such as the tag provided in a pQE vector (QIAGEN, Inc., 9259 Eton Avenue, Chatsworth, Calif., 91311), among others, many of which are commercially available. As described in Gentz et al., Proc. Natl. Acad. Sci. USA 86:821-824 (1989), for instance, hexa-histidine provides for convenient purification of the fusion protein. Another peptide tag useful for purification, the “HA” tag, corresponds to an epitope derived from the influenza hemagglutinin protein (Wilson et al., Cell 37:767 (1984)).

[1160] Additional fusion proteins of the invention may be generated through the techniques of gene-shuffling, motif-shuffling, exon-shuffling, and/or codon-shuffling (collectively referred to as “DNA shuffling”). DNA shuffling may be employed to modulate the activities of polypeptides of the invention, such methods can be used to generate polypeptides with altered activity, as well as agonists and antagonists of the polypeptides. See, generally, U.S. Pat. Nos. 5,605,793; 5,811,238; 5,830,721; 5,834,252; and 5,837,458, and Patten et al., Curr. Opinion Biotechnol. 8:724-33 (1997); Harayama, Trends Biotechnol. 16(2):76-82 (1998); Hansson, et al., J. Mol. Biol. 287:265-76 (1999); and Lorenzo and Blasco, Biotechniques 24(2):308-13 (1998) (each of these patents and publications are hereby incorporated by reference in its entirety). In one embodiment, alteration of polynucleotides corresponding to SEQ ID NO:X and the polypeptides encoded by these polynucleotides may be achieved by DNA shuffling. DNA shuffling involves the assembly of two or more DNA segments by homologous or site-specific recombination to generate variation in the polynucleotide sequence. In another embodiment, polynucleotides of the invention, or the encoded polypeptides, may be altered by being subjected to random mutagenesis by error-prone PCR, random nucleotide insertion or other methods prior to recombination. In another embodiment, one or more components, motifs, sections, parts, domains, fragments, etc., of a polynucleotide encoding a polypeptide of the invention may be recombined with one or more components, motifs, sections, parts, domains, fragments, etc. of one or more heterologous molecules.

[1161] Thus, any of these above fusions can be engineered using the polynucleotides or the polypeptides of the present invention.

Recombinant and Synthetic Production of Polypeptides of the Invention

[1162] The present invention also relates to vectors containing the polynucleotide of the present invention, host cells, and the production of polypeptides by synthetic and recombinant techniques. The vector may be, for example, a phage, plasmid, viral, or retroviral vector. Retroviral vectors may be replication competent or replication defective. In the latter case, viral propagation generally will occur only in complementing host cells.

[1163] The polynucleotides of the invention may be joined to a vector containing a selectable marker for propagation in a host. Generally, a plasmid vector is introduced in a precipitate, such as a calcium phosphate precipitate, or in a complex with a charged lipid. If the vector is a virus, it may be packaged in vitro using an appropriate packaging cell line and then transduced into host cells.

[1164] The polynucleotide insert should be operatively linked to an appropriate promoter, such as the phage lambda PL promoter, the E. coli lac, trp, phoA and tac promoters, the SV40 early and late promoters and promoters of retroviral LTRs, to name a few. Other suitable promoters will be known to the skilled artisan. The expression constructs will further contain sites for transcription initiation, termination, and, in the transcribed region, a ribosome binding site for translation. The coding portion of the transcripts expressed by the constructs will preferably include a translation initiating codon at the beginning and a termination codon (UAA, UGA or UAG) appropriately positioned at the end of the polypeptide to be translated.

[1165] As indicated, the expression vectors will preferably include at least one selectable marker. Such markers include dihydrofolate reductase, G418, glutamine synthase, or neomycin resistance for eukaryotic cell culture, and tetracycline, kanamycin or ampicillin resistance genes for culturing in E. coli and other bacteria. Representative examples of appropriate hosts include, but are not limited to, bacterial cells, such as E. coli, Streptomyces and Salmonella typhimurium cells; fungal cells, such as yeast cells (e.g., Saccharomyces cerevisiae or Pichia pastoris (ATCC Accession No. 201178)); insect cells such as Drosophila S2 and Spodoptera Sf9 cells; animal cells such as CHO, COS, 293, and Bowes melanoma cells; and plant cells. Appropriate culture mediums and conditions for the above-described host cells are known in the art.

[1166] Among vectors preferred for use in bacteria include pQE70, pQE60 and pQE-9, available from QIAGEN, Inc.; pBluescript vectors, Phagescript vectors, pNH8A, pNH16a, pNH18A, pNH46A, available from Stratagene Cloning Systems, Inc.; and ptrc99a, pKK223-3, pKK233-3, pDR540, pRIT5 available from Pharmacia Biotech, Inc. Among preferred eukaryotic vectors are pWLNEO, pSV2CAT, pOG44, pXT1 and pSG available from Stratagene; and pSVK3, pBPV, pMSG and pSVL available from Pharmacia. Preferred expression vectors for use in yeast systems include, but are not limited to pYES2, pYD1, pTEF1/Zeo, pYES2/GS, pPICZ, pGAPZ, pGAPZalph, pPIC9, pPIC3.5, pHIL-D2, pHIL-S1, pPIC3.5K, pPIC9K, and PA0815 (all available from Invitrogen, Carlbad, Calif.). Other suitable vectors will be readily apparent to the skilled artisan.

[1167] Vectors which use glutamine synthase (GS) or DHFR as the selectable markers can be amplified in the presence of the drugs methionine sulphoximine or methotrexate, respectively. An advantage of glutamine synthase based vectors are the availabilty of cell lines (e.g., the murine myeloma cell line, NS0) which are glutamine synthase negative. Glutamine synthase expression systems can also function in glutamine synthase expressing cells (e.g., Chinese Hamster Ovary (CHO) cells) by providing additional inhibitor to prevent the functioning of the endogenous gene. A glutamine synthase expression system and components thereof are detailed in PCT publications: WO87/04462; WO86/05807; WO89/01036; WO89/10404; and WO91/06657, which are hereby incorporated in their entireties by reference herein. Additionally, glutamine synthase expression vectors can be obtained from Lonza Biologics, Inc. (Portsmouth, N.H.). Expression and production of monoclonal antibodies using a GS expression system in murine myeloma cells is described in Bebbington et al., Bio/technology 10:169(1992) and in Biblia and Robinson Biotechnol. Prog. 11:1 (1995) which are herein incorporated by reference.

[1168] The present invention also relates to host cells containing the above-described vector constructs described herein, and additionally encompasses host cells containing nucleotide sequences of the invention that are operably associated with one or more heterologous control regions (e.g., promoter and/or enhancer) using techniques known of in the art. The host cell can be a higher eukaryotic cell, such as a mammalian cell (e.g., a human derived cell), or a lower eukaryotic cell, such as a yeast cell, or the host cell can be a prokaryotic cell, such as a bacterial cell. A host strain may be chosen which modulates the expression of the inserted gene sequences, or modifies and processes the gene product in the specific fashion desired. Expression from certain promoters can be elevated in the presence of certain inducers; thus expression of the genetically engineered polypeptide may be controlled. Furthermore, different host cells have characteristics and specific mechanisms for the translational and post-translational processing and modification (e.g., phosphorylation, cleavage) of proteins. Appropriate cell lines can be chosen to ensure the desired modifications and processing of the foreign protein expressed.

[1169] Introduction of the nucleic acids and nucleic acid constructs of the invention into the host cell can be effected by calcium phosphate transfection, DEAE-dextran mediated transfection, cationic lipid-mediated transfection, electroporation, transduction, infection, or other methods. Such methods are described in many standard laboratory manuals, such as Davis et al., Basic Methods In Molecular Biology (1986). It is specifically contemplated that the polypeptides of the present invention may in fact be expressed by a host cell lacking a recombinant vector.

[1170] In addition to encompassing host cells containing the vector constructs discussed herein, the invention also encompasses primary, secondary, and immortalized host cells of vertebrate origin, particularly mammalian origin, that have been engineered to delete or replace endogenous genetic material (e.g., the coding sequence), and/or to include genetic material (e.g., heterologous polynucleotide sequences) that is operably associated with polynucleotides of the invention, and which activates, alters, and/or amplifies endogenous polynucleotides. For example, techniques known in the art may be used to operably associate heterologous control regions (e.g., promoter and/or enhancer) and endogenous polynucleotide sequences via homologous recombination (see, e.g., U.S. Pat. No. 5,641,670, issued Jun. 24, 1997; International Publication Number WO 96/29411; International Publication Number WO 94/12650; Koller et al., Proc. Natl. Acad. Sci USA 86:8932-8935 (1989); and Zijlstra et al., Nature 342:435-438 (1989), the disclosures of each of which are incorporated by reference in their entireties).

[1171] Polypeptides of the invention can be recovered and purified from recombinant cell cultures by well-known methods including ammonium sulfate or ethanol precipitation, acid extraction, anion or cation exchange chromatography, phosphocellulose chromatography, hydrophobic interaction chromatography, affinity chromatography, hydroxylapatite chromatography and lectin chromatography. Most preferably, high performance liquid chromatography (“HPLC”) is employed for purification.

[1172] Polypeptides of the present invention can also be recovered from: products purified from natural sources, including bodily fluids, tissues and cells, whether directly isolated or cultured; products of chemical synthetic procedures; and products produced by recombinant techniques from a prokaryotic or eukaryotic host, including, for example, bacterial, yeast, higher plant, insect, and mammalian cells. Depending upon the host employed in a recombinant production procedure, the polypeptides of the present invention may be glycosylated or may be non-glycosylated. In addition, polypeptides of the invention may also include an initial modified methionine residue, in some cases as a result of host-mediated processes. Thus, it is well known in the art that the N-terminal methionine encoded by the translation initiation codon generally is removed with high efficiency from any protein after translation in all eukaryotic cells. While the N-terminal methionine on most proteins also is efficiently removed in most prokaryotes, for some proteins, this prokaryotic removal process is inefficient, depending on the nature of the amino acid to which the N-terminal methionine is covalently linked.

[1173] In one embodiment, the yeast Pichia pastoris is used to express polypeptides of the invention in a eukaryotic system. Pichia pastoris is a methylotrophic yeast which can metabolize methanol as its sole carbon source. A main step in the methanol metabolization pathway is the oxidation of methanol to formaldehyde using O₂. This reaction is catalyzed by the enzyme alcohol oxidase. In order to metabolize methanol as its sole carbon source, Pichia pastoris must generate high levels of alcohol oxidase due, in part, to the relatively low affinity of alcohol oxidase for O₂. Consequently, in a growth medium depending on methanol as a main carbon source, the promoter region of one of the two alcohol oxidase genes (AOX1) is highly active. In the presence of methanol, alcohol oxidase produced from the AOX1 gene comprises up to approximately 30% of the total soluble protein in Pichia pastoris. See Ellis, S. B., et al., Mol. Cell. Biol. 5:1111-21 (1985); Koutz, P. J, et al., Yeast 5:167-77 (1989); Tschopp, J. F., et al., Nucl. Acids Res. 15:3859-76 (1987). Thus, a heterologous coding sequence, such as, for example, a polynucleotide of the present invention, under the transcriptional regulation of all or part of the AOX1 regulatory sequence is expressed at exceptionally high levels in Pichia yeast grown in the presence of methanol.

[1174] In one example, the plasmid vector pPIC9K is used to express DNA encoding a polypeptide of the invention, as set forth herein, in a Pichea yeast system essentially as described in “Pichia Protocols: Methods in Molecular Biology,” D. R. Higgins and J. Cregg, eds. The Humana Press, Totowa, N.J., 1998. This expression vector allows expression and secretion of a polypeptide of the invention by virtue of the strong AOX1 promoter linked to the Pichia pastoris alkaline phosphatase (PHO) secretory signal peptide (i.e., leader) located upstream of a multiple cloning site.

[1175] Many other yeast vectors could be used in place of pPIC9K, such as, pYES2, pYD1, pTEF1/Zeo, pYES2/GS, pPICZ, pGAPZ, pGAPZalpha, pPIC9, pPIC3.5, pHIL-D2, pHIL-S1, pPIC3.5K, and PA0815, as one skilled in the art would readily appreciate, as long as the proposed expression construct provides appropriately located signals for transcription, translation, secretion (if desired), and the like, including an in-frame AUG as required.

[1176] In another embodiment, high-level expression of a heterologous coding sequence, such as, for example, a polynucleotide of the present invention, may be achieved by cloning the heterologous polynucleotide of the invention into an expression vector such as, for example, pGAPZ or pGAPZalpha, and growing the yeast culture in the absence of methanol.

[1177] In addition to encompassing host cells containing the vector constructs discussed herein, the invention also encompasses primary, secondary, and immortalized host cells of vertebrate origin, particularly mammalian origin, that have been engineered to delete or replace endogenous genetic material (e.g., coding sequence), and/or to include genetic material (e.g., heterologous polynucleotide sequences) that is operably associated with polynucleotides of the invention, and which activates, alters, and/or amplifies endogenous polynucleotides. For example, techniques known in the art may be used to operably associate heterologous control regions (e.g., promoter and/or enhancer) and endogenous polynucleotide sequences via homologous recombination (see, e.g., U.S. Pat. No. 5,641,670, issued Jun. 24, 1997; International Publication No. WO 96/29411, published Sep. 26, 1996; International Publication No. WO 94/12650, published Aug. 4, 1994; Koller et al., Proc. Natl. Acad. Sci. USA 86:8932-8935 (1989); and Zijlstra et al., Nature 342:435-438 (1989), the disclosures of each of which are incorporated by reference in their entireties).

[1178] In addition, polypeptides of the invention can be chemically synthesized using techniques known in the art (e.g., see Creighton, 1983, Proteins: Structures and Molecular Principles, W.H. Freeman & Co., N.Y., and Hunkapiller et al., Nature, 310:105-111 (1984)). For example, a polypeptide corresponding to a fragment of a polypeptide can be synthesized by use of a peptide synthesizer. Furthermore, if desired, nonclassical amino acids or chemical amino acid analogs can be introduced as a substitution or addition into the polypeptide sequence. Non-classical amino acids include, but are not limited to, to the D-isomers of the common amino acids, 2,4-diaminobutyric acid, a-amino isobutyric acid, 4-aminobutyric acid, Abu, 2-amino butyric acid, g-Abu, e-Ahx, 6-amino hexanoic acid, Aib, 2-amino isobutyric acid, 3-amino propionic acid, ornithine, norleucine, norvaline, hydroxyproline, sarcosine, citrulline, homocitrulline, cysteic acid, t-butylglycine, t-butylalanine, phenylglycine, cyclohexylalanine, b-alanine, fluoro-amino acids, designer amino acids such as b-methyl amino acids, Ca-methyl amino acids, Na-methyl amino acids, and amino acid analogs in general. Furthermore, the amino acid can be D (dextrorotary) or L (levorotary).

[1179] The invention encompasses polypeptides of the present invention which are differentially modified during or after translation, e.g., by glycosylation, acetylation, phosphorylation, amidation, derivatization by known protecting/blocking groups, proteolytic cleavage, linkage to an antibody molecule or other cellular ligand, etc. Any of numerous chemical modifications may be carried out by known techniques, including but not limited, to specific chemical cleavage by cyanogen bromide, trypsin, chymotrypsin, papain, V8 protease, NaBH₄; acetylation, formylation, oxidation, reduction; metabolic synthesis in the presence of tunicamycin; etc.

[1180] Additional post-translational modifications encompassed by the invention include, for example, e.g., N-linked or O-linked carbohydrate chains, processing of N-terminal or C-terminal ends), attachment of chemical moieties to the amino acid backbone, chemical modifications of N-linked or O-linked carbohydrate chains, and addition or deletion of an N-terminal methionine residue as a result of procaryotic host cell expression. The polypeptides may also be modified with a detectable label, such as an enzymatic, fluorescent, isotopic or affinity label to allow for detection and isolation of the protein.

[1181] Examples of suitable enzymes include horseradish peroxidase, alkaline phosphatase, beta-galactosidase, or acetylcholinesterase; examples of suitable prosthetic group complexes include streptavidin/biotin and avidin/biotin; examples of suitable fluorescent materials include umbelliferone, fluorescein, fluorescein isothiocyanate, rhodamine, dichlorotriazinylamine fluorescein, dansyl chloride or phycoerythrin; an example of a luminescent material includes luminol; examples of bioluminescent materials include luciferase, luciferin, and aequorin; and examples of suitable radioactive material include iodine (¹²¹I, ¹²³I, ¹²⁵I, ¹³¹I), carbon (¹⁴C), sulfur (³⁵S), tritium (³H), indium (¹¹¹In, ¹¹²In, ^{113m}In, ^{115m}In), technetium (⁹⁹Tc, ^{99m}Tc), thallium (²⁰¹Ti), gallium (⁶⁸Ga, ⁶⁷Ga), palladium (¹⁰³Pd), molybdenum (⁹⁹Mo), xenon (¹³³Xe), fluorine (¹⁸F), ¹⁵³Sm, ¹⁷⁷Lu, ¹⁵⁹Gd, ¹⁴⁹ Pm, ¹⁴⁰La, ¹⁷⁵Yb, ¹⁶⁶Ho, ⁹⁰Y, ⁴⁷Sc, ¹⁸⁶Re, ¹⁸⁸Re, ¹⁴²Pr, ¹⁰⁵Rh, and ⁹⁷Ru.

[1182] In specific embodiments, a polypeptide of the present invention or fragment or variant thereof is attached to macrocyclic chelators that associate with radiometal ions, including but not limited to, ¹⁷⁷Lu, ⁹⁰Y, ¹⁶⁶ Ho, and ¹⁵³Sm, to polypeptides. In a preferred embodiment, the radiometal ion associated with the macrocyclic chelators is ¹¹¹In. In another preferred embodiment, the radiometal ion associated with the macrocyclic chelator is ⁹⁰Y. In specific embodiments, the macrocyclic chelator is 1,4,7,10-tetraazacyclododecane-N,N′,N″,N′″-tetraacetic acid (DOTA). In other specific embodiments, DOTA is attached to an antibody of the invention or fragment thereof via a linker molecule. Examples of linker molecules useful for conjugating DOTA to a polypeptide are commonly known in the art—see, for example, DeNardo et al., Clin Cancer Res. 4(10):2483-90 (1998); Peterson et al., Bioconjug. Chem. 10(4):553-7 (1999); and Zimmerman et al., Nucl. Med. Biol. 26(8):943-50 (1999); which are hereby incorporated by reference in their entirety.

[1183] As mentioned, the proteins of the invention may be modified by either natural processes, such as posttranslational processing, or by chemical modification techniques which are well known in the art. It will be appreciated that the same type of modification may be present in the same or varying degrees at several sites in a given polypeptide. Polypeptides of the invention may be branched, for example, as a result of ubiquitination, and they may be cyclic, with or without branching. Cyclic, branched, and branched cyclic polypeptides may result from posttranslation natural processes or may be made by synthetic methods. Modifications include acetylation, acylation, ADP-ribosylation, amidation, covalent attachment of flavin, covalent attachment of a heme moiety, covalent attachment of a nucleotide or nucleotide derivative, covalent attachment of a lipid or lipid derivative, covalent attachment of phosphotidylinositol, cross-linking, cyclization, disulfide bond formation, demethylation, formation of covalent cross-links, formation of cysteine, formation of pyroglutamate, formylation, gamma-carboxylation, glycosylation, GPI anchor formation, hydroxylation, iodination, methylation, myristoylation, oxidation, pegylation, proteolytic processing, phosphorylation, prenylation, racemization, selenoylation, sulfation, transfer-RNA mediated addition of amino acids to proteins such as arginylation, and ubiquitination. (See, for instance, PROTEINS—STRUCTURE AND MOLECULAR PROPERTIES, 2nd Ed., T. E. Creighton, W. H. Freeman and Company, New York (1993); POSTTRANSLATIONAL COVALENT MODIFICATION OF PROTEINS, B. C. Johnson, Ed., Academic Press, New York, pgs. 1-12 (1983); Seifter et al., Meth. Enzymol. 182:626-646 (1990); Rattan et al., Ann. N.Y. Acad. Sci. 663:48-62 (1992)).

[1184] Also provided by the invention are chemically modified derivatives of the polypeptides of the invention which may provide additional advantages such as increased solubility, stability and circulating time of the polypeptide, or decreased immunogenicity (see U.S. Pat. No. 4,179,337). The chemical moieties for derivitization may be selected from water soluble polymers such as polyethylene glycol, ethylene glycol/propylene glycol copolymers, carboxymethylcellulose, dextran, polyvinyl alcohol and the like. The polypeptides may be modified at random positions within the molecule, or at predetermined positions within the molecule and may include one, two, three or more attached chemical moieties.

[1185] The polymer may be of any molecular weight, and may be branched or unbranched. For polyethylene glycol, the preferred molecular weight is between about 1 kDa and about 100 kDa (the term “about” indicating that in preparations of polyethylene glycol, some molecules will weigh more, some less, than the stated molecular weight) for ease in handling and manufacturing. Other sizes may be used, depending on the desired therapeutic profile (e.g., the duration of sustained release desired, the effects, if any on biological activity, the ease in handling, the degree or lack of antigenicity and other known effects of the polyethylene glycol to a therapeutic protein or analog). For example, the polyethylene glycol may have an average molecular weight of about 200, 500, 1000, 1500, 2000, 2500, 3000, 3500, 4000, 4500, 5000, 5500, 6000, 6500, 7000, 7500, 8000, 8500, 9000, 9500, 10,000, 10,500, 11,000, 11,500, 12,000, 12,500, 13,000, 13,500, 14,000, 14,500, 15,000, 15,500, 16,000, 16,500, 17,000, 17,500, 18,000, 18,500, 19,000, 19,500, 20,000, 25,000, 30,000, 35,000, 40,000, 45,000, 50,000, 55,000, 60,000, 65,000, 70,000, 75,000, 80,000, 85,000, 90,000, 95,000, or 100,000 kDa.

[1186] As noted above, the polyethylene glycol may have a branched structure. Branched polyethylene glycols are described, for example, in U.S. Pat. No. 5,643,575; Morpurgo et al., Appl. Biochem. Biotechnol. 56:59-72 (1996); Vorobjev et al., Nucleosides Nucleotides 18:2745-2750 (1999); and Caliceti et al., Bioconjug. Chem. 10:638-646 (1999), the disclosures of each of which are incorporated herein by reference.

[1187] The polyethylene glycol molecules (or other chemical moieties) should be attached to the protein with consideration of effects on functional or antigenic domains of the protein. There are a number of attachment methods available to those skilled in the art, such as, for example, the method disclosed in EP 0 401 384 (coupling PEG to G-CSF), herein incorporated by reference; see also Malik et al., Exp. Hematol. 20:1028-1035 (1992), reporting pegylation of GM-CSF using tresyl chloride. For example, polyethylene glycol may be covalently bound through amino acid residues via a reactive group, such as a free amino or carboxyl group. Reactive groups are those to which an activated polyethylene glycol molecule may be bound. The amino acid residues having a free amino group may include lysine residues and the N-terminal amino acid residues; those having a free carboxyl group may include aspartic acid residues glutamic acid residues and the C-terminal amino acid residue. Sulfhydryl groups may also be used as a reactive group for attaching the polyethylene glycol molecules. Preferred for therapeutic purposes is attachment at an amino group, such as attachment at the N-terminus or lysine group.

[1188] As suggested above, polyethylene glycol may be attached to proteins via linkage to any of a number of amino acid residues. For example, polyethylene glycol can be linked to proteins via covalent bonds to lysine, histidine, aspartic acid, glutamic acid, or cysteine residues. One or more reaction chemistries may be employed to attach polyethylene glycol to specific amino acid residues (e.g., lysine, histidine, aspartic acid, glutamic acid, or cysteine) of the protein or to more than one type of amino acid residue (e.g., lysine, histidine, aspartic acid, glutamic acid, cysteine and combinations thereof) of the protein.

[1189] One may specifically desire proteins chemically modified at the N-terminus. Using polyethylene glycol as an illustration of the present composition, one may select from a variety of polyethylene glycol molecules (by molecular weight, branching, etc.), the proportion of polyethylene glycol molecules to protein (polypeptide) molecules in the reaction mix, the type of pegylation reaction to be performed, and the method of obtaining the selected N-terminally pegylated protein. The method of obtaining the N-terminally pegylated preparation (i.e., separating this moiety from other monopegylated moieties if necessary) may be by purification of the N-terminally pegylated material from a population of pegylated protein molecules. Selective proteins chemically modified at the N-terminus modification may be accomplished by reductive alkylation which exploits differential reactivity of different types of primary amino groups (lysine versus the N-terminal) available for derivatization in a particular protein. Under the appropriate reaction conditions, substantially selective derivatization of the protein at the N-terminus with a carbonyl group containing polymer is achieved.

[1190] As indicated above, pegylation of the proteins of the invention may be accomplished by any number of means. For example, polyethylene glycol may be attached to the protein either directly or by an intervening linker. Linkerless systems for attaching polyethylene glycol to proteins are described in Delgado et al., Crit. Rev. Thera. Drug Carrier Sys. 9:249-304 (1992); Francis et al., Intern. J. of Hematol. 68:1-18 (1998); U.S. Pat. No. 4,002,531; U.S. Pat. No. 5,349,052; WO 95/06058; and WO 98/32466, the disclosures of each of which are incorporated herein by reference.

[1191] One system for attaching polyethylene glycol directly to amino acid residues of proteins without an intervening linker employs tresylated MPEG, which is produced by the modification of monmethoxy polyethylene glycol (MPEG) using tresylchloride (ClSO₂CH₂CF₃). Upon reaction of protein with tresylated MPEG, polyethylene glycol is directly attached to amine groups of the protein. Thus, the invention includes protein-polyethylene glycol conjugates produced by reacting proteins of the invention with a polyethylene glycol molecule having a 2,2,2-trifluoreothane sulphonyl group.

[1192] Polyethylene glycol can also be attached to proteins using a number of different intervening linkers. For example, U.S. Pat. No. 5,612,460, the entire disclosure of which is incorporated herein by reference, discloses urethane linkers for connecting polyethylene glycol to proteins. Protein-polyethylene glycol conjugates wherein the polyethylene glycol is attached to the protein by a linker can also be produced by reaction of proteins with compounds such as MPEG-succinimidylsuccinate, MPEG activated with 1,1′-carbonyldiimidazole, MPEG-2,4,5-trichloropenylcarbonate, MPEG-p-nitrophenolcarbonate, and various MPEG-succinate derivatives. A number of additional polyethylene glycol derivatives and reaction chemistries for attaching polyethylene glycol to proteins are described in International Publication No. WO 98/32466, the entire disclosure of which is incorporated herein by reference. Pegylated protein products produced using the reaction chemistries set out herein are included within the scope of the invention.

[1193] The number of polyethylene glycol moieties attached to each protein of the invention (i.e., the degree of substitution) may also vary. For example, the pegylated proteins of the invention may be linked, on average, to 1, 2, 3, 4, 5, 6, 7, 8, 9, 10, 12, 15, 17, 20, or more polyethylene glycol molecules. Similarly, the average degree of substitution within ranges such as 1-3, 2-4, 3-5, 4-6, 5-7, 6-8, 7-9, 8-10, 9-11, 10-12, 11-13, 12-14, 13-15, 14-16, 15-17, 16-18, 17-19, or 18-20 polyethylene glycol moieties per protein molecule. Methods for determining the degree of substitution are discussed, for example, in Delgado et al., Crit. Rev. Thera. Drug Carrier Sys. 9:249-304 (1992).

[1194] The polypeptides of the invention can be recovered and purified from chemical synthesis and recombinant cell cultures by standard methods which include, but are not limited to, ammonium sulfate or ethanol precipitation, acid extraction, anion or cation exchange chromatography, phosphocellulose chromatography, hydrophobic interaction chromatography, affinity chromatography, hydroxylapatite chromatography and lectin chromatography. Most preferably, high performance liquid chromatography (“HPLC”) is employed for purification. Well known techniques for refolding protein may be employed to regenerate active conformation when the polypeptide is denatured during isolation and/or purification.

[1195] The polypeptides of the invention may be in monomers or multimers (i.e., dimers, trimers, tetramers and higher multimers). Accordingly, the present invention relates to monomers and multimers of the polypeptides of the invention, their preparation, and compositions (preferably, Therapeutics) containing them. In specific embodiments, the polypeptides of the invention are monomers, dimers, trimers or tetramers. In additional embodiments, the multimers of the invention are at least dimers, at least trimers, or at least tetramers.

[1196] Multimers encompassed by the invention may be homomers or heteromers. As used herein, the term homomer refers to a multimer containing only polypeptides corresponding to a protein of the invention (e.g., the amino acid sequence of SEQ ID NO:Y, an amino acid sequence encoded by SEQ ID NO:X or the complement of SEQ ID NO:X, the amino acid sequence encoded by the portion of SEQ ID NO:X as defined in columns 8 and 9 of Table 2, and/or an amino acid sequence encoded by cDNA contained in ATCC Deposit No:Z (including fragments, variants, splice variants, and fusion proteins, corresponding to these as described herein)). These homomers may contain polypeptides having identical or different amino acid sequences. In a specific embodiment, a homomer of the invention is a multimer containing only polypeptides having an identical amino acid sequence. In another specific embodiment, a homomer of the invention is a multimer containing polypeptides having different amino acid sequences. In specific embodiments, the multimer of the invention is a homodimer (e.g., containing two polypeptides having identical or different amino acid sequences) or a homotrimer (e.g., containing three polypeptides having identical and/or different amino acid sequences). In additional embodiments, the homomeric multimer of the invention is at least a homodimer, at least a homotrimer, or at least a homotetramer.

[1197] As used herein, the term heteromer refers to a multimer containing one or more heterologous polypeptides (i.e., polypeptides of different proteins) in addition to the polypeptides of the invention. In a specific embodiment, the multimer of the invention is a heterodimer, a heterotrimer, or a heterotetramer. In additional embodiments, the heteromeric multimer of the invention is at least a heterodimer, at least a heterotrimer, or at least a heterotetramer.

[1198] Multimers of the invention may be the result of hydrophobic, hydrophilic, ionic and/or covalent associations and/or may be indirectly linked by, for example, liposome formation. Thus, in one embodiment, multimers of the invention, such as, for example, homodimers or homotrimers, are formed when polypeptides of the invention contact one another in solution. In another embodiment, heteromultimers of the invention, such as, for example, heterotrimers or heterotetramers, are formed when polypeptides of the invention contact antibodies to the polypeptides of the invention (including antibodies to the heterologous polypeptide sequence in a fusion protein of the invention) in solution. In other embodiments, multimers of the invention are formed by covalent associations with and/or between the polypeptides of the invention. Such covalent associations may involve one or more amino acid residues contained in the polypeptide sequence (e.g., that recited in SEQ ID NO:Y, encoded by the portion of SEQ ID NO:X as defined in columns 8 and 9 of Table 2, and/or encoded by the cDNA contained in ATCC Deposit No:Z). In one instance, the covalent associations are cross-linking between cysteine residues located within the polypeptide sequences which interact in the native (i.e., naturally occurring) polypeptide. In another instance, the covalent associations are the consequence of chemical or recombinant manipulation. Alternatively, such covalent associations may involve one or more amino acid residues contained in the heterologous polypeptide sequence in a fusion protein. In one example, covalent associations are between the heterologous sequence contained in a fusion protein of the invention (see, e.g., U.S. Pat. No. 5,478,925). In a specific example, the covalent associations are between the heterologous sequence contained in a Fc fusion protein of the invention (as described herein). In another specific example, covalent associations of fusion proteins of the invention are between heterologous polypeptide sequence from another protein that is capable of forming covalently associated multimers, such as for example, osteoprotegerin (see, e.g., International Publication NO: WO 98/49305, the contents of which are herein incorporated by reference in its entirety). In another embodiment, two or more polypeptides of the invention are joined through peptide linkers. Examples include those peptide linkers described in U.S. Pat. No. 5,073,627 (hereby incorporated by reference). Proteins comprising multiple polypeptides of the invention separated by peptide linkers may be produced using conventional recombinant DNA technology.

[1199] Another method for preparing multimer polypeptides of the invention involves use of polypeptides of the invention fused to a leucine zipper or isoleucine zipper polypeptide sequence. Leucine zipper and isoleucine zipper domains are polypeptides that promote multimerization of the proteins in which they are found. Leucine zippers were originally identified in several DNA-binding proteins (Landschulz et al., Science 240:1759, (1988)), and have since been found in a variety of different proteins. Among the known leucine zippers are naturally occurring peptides and derivatives thereof that dimerize or trimerize. Examples of leucine zipper domains suitable for producing soluble multimeric proteins of the invention are those described in PCT application WO 94/10308, hereby incorporated by reference. Recombinant fusion proteins comprising a polypeptide of the invention fused to a polypeptide sequence that dimerizes or trimerizes in solution are expressed in suitable host cells, and the resulting soluble multimeric fusion protein is recovered from the culture supernatant using techniques known in the art.

[1200] Trimeric polypeptides of the invention may offer the advantage of enhanced biological activity. Preferred leucine zipper moieties and isoleucine moieties are those that preferentially form trimers. One example is a leucine zipper derived from lung surfactant protein D (SPD), as described in Hoppe et al. (FEBS Letters 344:191, (1994)) and in U.S. patent application Ser. No. 08/446,922, hereby incorporated by reference. Other peptides derived from naturally occurring trimeric proteins may be employed in preparing trimeric polypeptides of the invention.

[1201] In another example, proteins of the invention are associated by interactions between Flag® polypeptide sequence contained in fusion proteins of the invention containing Flag® polypeptide sequence. In a further embodiment, proteins of the invention are associated by interactions between heterologous polypeptide sequence contained in Flag® fusion proteins of the invention and anti-Flag® antibody.

[1202] The multimers of the invention may be generated using chemical techniques known in the art. For example, polypeptides desired to be contained in the multimers of the invention may be chemically cross-linked using linker molecules and linker molecule length optimization techniques known in the art (see, e.g., U.S. Pat. No. 5,478,925, which is herein incorporated by reference in its entirety). Additionally, multimers of the invention may be generated using techniques known in the art to form one or more inter-molecule cross-links between the cysteine residues located within the sequence of the polypeptides desired to be contained in the multimer (see, e.g., U.S. Pat. No. 5,478,925, which is herein incorporated by reference in its entirety). Further, polypeptides of the invention may be routinely modified by the addition of cysteine or biotin to the C-terminus or N-terminus of the polypeptide and techniques known in the art may be applied to generate multimers containing one or more of these modified polypeptides (see, e.g., U.S. Pat. No. 5,478,925, which is herein incorporated by reference in its entirety). Additionally, techniques known in the art may be applied to generate liposomes containing the polypeptide components desired to be contained in the multimer of the invention (see, e.g., U.S. Pat. No. 5,478,925, which is herein incorporated by reference in its entirety).

[1203] Alternatively, multimers of the invention may be generated using genetic engineering techniques known in the art. In one embodiment, polypeptides contained in multimers of the invention are produced recombinantly using fusion protein technology described herein or otherwise known in the art (see, e.g., U.S. Pat. No. 5,478,925, which is herein incorporated by reference in its entirety). In a specific embodiment, polynucleotides coding for a homodimer of the invention are generated by ligating a polynucleotide sequence encoding a polypeptide of the invention to a sequence encoding a linker polypeptide and then further to a synthetic polynucleotide encoding the translated product of the polypeptide in the reverse orientation from the original C-terminus to the N-terminus (lacking the leader sequence) (see, e.g., U.S. Pat. No. 5,478,925, which is herein incorporated by reference in its entirety). In another embodiment, recombinant techniques described herein or otherwise known in the art are applied to generate recombinant polypeptides of the invention which contain a transmembrane domain (or hydrophobic or signal peptide) and which can be incorporated by membrane reconstitution techniques into liposomes (see, e.g., U.S. Pat. No. 5,478,925, which is herein incorporated by reference in its entirety).

Antibodies

[1204] Further polypeptides of the invention relate to antibodies and T-cell antigen receptors (TCR) which immunospecifically bind a polypeptide, polypeptide fragment, or variant of the invention (e.g., a polypeptide or fragment or variant of the amino acid sequence of SEQ ID NO:Y or a polypeptide encoded by the cDNA contained in ATCC Deposit No:Z, and/or an epitope, of the present invention) as determined by immunoassays well known in the art for assaying specific antibody-antigen binding. Antibodies of the invention include, but are not limited to, polyclonal, monoclonal, multispecific, human, humanized or chimeric antibodies, single chain antibodies, Fab fragments, F(ab′) fragments, fragments produced by a Fab expression library, anti-idiotypic (anti-Id) antibodies (including, e.g., anti-Id antibodies to antibodies of the invention), intracellularly-made antibodies (i.e., intrabodies), and epitope-binding fragments of any of the above. The term “antibody,” as used herein, refers to immunoglobulin molecules and immunologically active portions of immunoglobulin molecules, i.e., molecules that contain an antigen binding site that immunospecifically binds an antigen. The immunoglobulin molecules of the invention can be of any type (e.g., IgG, IgE, IgM, IgD, IgA and IgY), class (e.g., IgG1, IgG2, IgG3, IgG4, IgA1 and IgA2) or subclass of immunoglobulin molecule. In preferred embodiments, the immunoglobulin molecules of the invention are IgG1. In other preferred embodiments, the immunoglobulin molecules of the invention are IgG4.

[1205] Most preferably the antibodies are human antigen-binding antibody fragments of the present invention and include, but are not limited to, Fab, Fab′ and F(ab′)2, Fd, single-chain Fvs (scFv), single-chain antibodies, disulfide-linked Fvs (sdFv) and fragments comprising either a VL or VH domain. Antigen-binding antibody fragments, including single-chain antibodies, may comprise the variable region(s) alone or in combination with the entirety or a portion of the following: hinge region, CH1, CH2, and CH3 domains. Also included in the invention are antigen-binding fragments also comprising any combination of variable region(s) with a hinge region, CH1, CH2, and CH3 domains. The antibodies of the invention may be from any animal origin including birds and mammals. Preferably, the antibodies are human, murine (e.g., mouse and rat), donkey, ship rabbit, goat, guinea pig, camel, horse, or chicken. As used herein, “human” antibodies include antibodies having the amino acid sequence of a human immunoglobulin and include antibodies isolated from human immunoglobulin libraries or from animals transgenic for one or more human immunoglobulin and that do not express endogenous immunoglobulins, as described infra and, for example in, U.S. Pat. No. 5,939,598 by Kucherlapati et al.

[1206] The antibodies of the present invention may be monospecific, bispecific, trispecific or of greater multispecificity. Multispecific antibodies may be specific for different epitopes of a polypeptide of the present invention or may be specific for both a polypeptide of the present invention as well as for a heterologous epitope, such as a heterologous polypeptide or solid support material. See, e.g., PCT publications WO 93/17715; WO 92/08802; WO 91/00360; WO 92/05793; Tutt, et al., J. Immunol. 147:60-69 (1991); U.S. Pat. Nos. 4,474,893; 4,714,681; 4,925,648; 5,573,920; 5,601,819; Kostelny et al., J. Immunol. 148:1547-1553 (1992).

[1207] Antibodies of the present invention may be described or specified in terms of the epitope(s) or portion(s) of a polypeptide of the present invention which they recognize or specifically bind. The epitope(s) or polypeptide portion(s) may be specified as described herein, e.g., by N-terminal and C-terminal positions, or by size in contiguous amino acid residues, or listed in the Tables and Figures. Preferred epitopes of the invention include the predicted epitopes shown in column 7 of Table 1B, as well as polynucleotides that encode these epitopes. Antibodies which specifically bind any epitope or polypeptide of the present invention may also be excluded. Therefore, the present invention includes antibodies that specifically bind polypeptides of the present invention, and allows for the exclusion of the same.

[1208] Antibodies of the present invention may also be described or specified in terms of their cross-reactivity. Antibodies that do not bind any other analog, ortholog, or homolog of a polypeptide of the present invention are included. Antibodies that bind polypeptides with at least 95%, at least 90%, at least 85%, at least 80%, at least 75%, at least 70%, at least 65%, at least 60%, at least 55%, and at least 50% identity (as calculated using methods known in the art and described herein) to a polypeptide of the present invention are also included in the present invention. In specific embodiments, antibodies of the present invention cross-react with murine, rat and/or rabbit homologs of human proteins and the corresponding epitopes thereof. Antibodies that do not bind polypeptides with less than 95%, less than 90%, less than 85%, less than 80%, less than 75%, less than 70%, less than 65%, less than 60%, less than 55%, and less than 50% identity (as calculated using methods known in the art and described herein) to a polypeptide of the present invention are also included in the present invention. In a specific embodiment, the above-described cross-reactivity is with respect to any single specific antigenic or immunogenic polypeptide, or combination(s) of 2, 3, 4, 5, or more of the specific antigenic and/or immunogenic polypeptides disclosed herein. Further included in the present invention are antibodies which bind polypeptides encoded by polynucleotides which hybridize to a polynucleotide of the present invention under stringent hybridization conditions (as described herein). Antibodies of the present invention may also be described or specified in terms of their binding affinity to a polypeptide of the invention. Preferred binding affinities include those with a dissociation constant or Kd less than 5×10⁻² M, 10⁻² M, 5×10⁻³ M, 10⁻³ M, 5×10⁻⁴M, 10⁻⁴ M, 5×10⁻⁻⁵ M, 10⁻⁵ M, 5×10⁻⁻⁶ M, 10⁻⁶ M, 5×10⁻⁷ M, 10⁷ M, 5×10⁻⁻⁸ M, 10⁻⁸ M, 5×10⁻⁹ M, 10⁻⁹ M, 5×10⁻¹⁰ M, 10⁻¹⁰ M, 5×10⁻¹¹ M, 10⁻¹¹ M, 5×10⁻¹² M, 10⁻¹² M, 5×10⁻¹³ M, 10⁻¹³ M, 5×10⁻¹⁴ M, 10⁻¹⁴ M, 5×10⁻¹⁵ M, or 10⁻¹⁵ M.

[1209] The invention also provides antibodies that competitively inhibit binding of an antibody to an epitope of the invention as determined by any method known in the art for determining competitive binding, for example, the immunoassays described herein. In preferred embodiments, the antibody competitively inhibits binding to the epitope by at least 95%, at least 90%, at least 85%, at least 80%, at least 75%, at least 70%, at least 60%, or at least 50%.

[1210] Antibodies of the present invention may act as agonists or antagonists of the polypeptides of the present invention. For example, the present invention includes antibodies which disrupt the receptor/ligand interactions with the polypeptides of the invention either partially or fully. Preferably, antibodies of the present invention bind an antigenic epitope disclosed herein, or a portion thereof. The invention features both receptor-specific antibodies and ligand-specific antibodies. The invention also features receptor-specific antibodies which do not prevent ligand binding but prevent receptor activation. Receptor activation (i.e., signaling) may be determined by techniques described herein or otherwise known in the art. For example, receptor activation can be determined by detecting the phosphorylation (e.g., tyrosine or serine/threonine) of the receptor or its substrate by immunoprecipitation followed by western blot analysis (for example, as described supra). In specific embodiments, antibodies are provided that inhibit ligand activity or receptor activity by at least 95%, at least 90%, at least 85%, at least 80%, at least 75%, at least 70%, at least 60%, or at least 50% of the activity in absence of the antibody.

[1211] The invention also features receptor-specific antibodies which both prevent ligand binding and receptor activation as well as antibodies that recognize the receptor-ligand complex, and, preferably, do not specifically recognize the unbound receptor or the unbound ligand. Likewise, included in the invention are neutralizing antibodies which bind the ligand and prevent binding of the ligand to the receptor, as well as antibodies which bind the ligand, thereby preventing receptor activation, but do not prevent the ligand from binding the receptor. Further included in the invention are antibodies which activate the receptor. These antibodies may act as receptor agonists, i.e., potentiate or activate either all or a subset of the biological activities of the ligand-mediated receptor activation, for example, by inducing dimerization of the receptor. The antibodies may be specified as agonists, antagonists or inverse agonists for biological activities comprising the specific biological activities of the peptides of the invention disclosed herein. The above antibody agonists can be made using methods known in the art. See, e.g., PCT publication WO 96/40281; U.S. Pat. No. 5,811,097; Deng et al., Blood 92(6):1981-1988 (1998); Chen et al., Cancer Res. 58(16):3668-3678 (1998); Harrop et al., J. Immunol. 161(4):1786-1794 (1998); Zhu et al., Cancer Res. 58(15):3209-3214 (1998); Yoon et al., J. Immunol. 160(7):3170-3179 (1998); Prat et al., J. Cell. Sci. 111(Pt2):237-247 (1998); Pitard et al., J. Immunol. Methods 205(2):177-190 (1997); Liautard et al., Cytokine 9(4):233-241 (1997); Carlson et al., J. Biol. Chem. 272(17):11295-11301 (1997); Taryman et al., Neuron 14(4):755-762 (1995); Muller et al., Structure 6(9):1153-1167 (1998); Bartunek et al., Cytokine 8(1):14-20 (1996) (which are all incorporated by reference herein in their entireties).

[1212] Antibodies of the present invention may be used, for example, to purify, detect, and target the polypeptides of the present invention, including both in vitro and in vivo diagnostic and therapeutic methods. For example, the antibodies have utility in immunoassays for qualitatively and quantitatively measuring levels of the polypeptides of the present invention in biological samples. See, e.g., Harlow et al., Antibodies: A Laboratory Manual, (Cold Spring Harbor Laboratory Press, 2nd ed. 1988); incorporated by reference herein in its entirety.

[1213] As discussed in more detail below, the antibodies of the present invention may be used either alone or in combination with other compositions. The antibodies may further be recombinantly fused to a heterologous polypeptide at the N- or C-terminus or chemically conjugated (including covalent and non-covalent conjugations) to polypeptides or other compositions. For example, antibodies of the present invention may be recombinantly fused or conjugated to molecules useful as labels in detection assays and effector molecules such as heterologous polypeptides, drugs, radionuclides, or toxins. See, e.g., PCT publications WO 92/08495; WO 91/14438; WO 89/12624; U.S. Pat. No. 5,314,995; and EP 396,387; the disclosures of which are incorporated herein by reference in their entireties.

[1214] The antibodies of the invention include derivatives that are modified, i.e, by the covalent attachment of any type of molecule to the antibody such that covalent attachment does not prevent the antibody from generating an anti-idiotypic response. For example, but not by way of limitation, the antibody derivatives include antibodies that have been modified, e.g., by glycosylation, acetylation, pegylation, phosphylation, amidation, derivatization by known protecting/blocking groups, proteolytic cleavage, linkage to a cellular ligand or other protein, etc. Any of numerous chemical modifications may be carried out by known techniques, including, but not limited to specific chemical cleavage, acetylation, formylation, metabolic synthesis of tunicamycin, etc. Additionally, the derivative may contain one or more non-classical amino acids.

[1215] The antibodies of the present invention may be generated by any suitable method known in the art. Polyclonal antibodies to an antigen-of-interest can be produced by various procedures well known in the art. For example, a polypeptide of the invention can be administered to various host animals including, but not limited to, rabbits, mice, rats, etc. to induce the production of sera containing polyclonal antibodies specific for the antigen. Various adjuvants may be used to increase the immunological response, depending on the host species, and include but are not limited to, Freund's (complete and incomplete), mineral gels such as aluminum hydroxide, surface active substances such as lysolecithin, pluronic polyols, polyanions, peptides, oil emulsions, keyhole limpet hemocyanins, dinitrophenol, and potentially useful human adjuvants such as BCG (bacille Calmette-Guerin) and corynebacterium parvum. Such adjuvants are also well known in the art.

[1216] Monoclonal antibodies can be prepared using a wide variety of techniques known in the art including the use of hybridoma, recombinant, and phage display technologies, or a combination thereof. For example, monoclonal antibodies can be produced using hybridoma techniques including those known in the art and taught, for example, in Harlow et al., Antibodies: A Laboratory Manual, (Cold Spring Harbor Laboratory Press, 2nd ed. 1988); Hammerling, et al., in: Monoclonal Antibodies and T-Cell Hybridomas 563-681 (Elsevier, N.Y., 1981) (said references incorporated by reference in their entireties). The term “monoclonal antibody” as used herein is not limited to antibodies produced through hybridoma technology. The term “monoclonal antibody” refers to an antibody that is derived from a single clone, including any eukaryotic, prokaryotic, or phage clone, and not the method by which it is produced.

[1217] Methods for producing and screening for specific antibodies using hybridoma technology are routine and well known in the art and are discussed in detail in the Examples. In a non-limiting example, mice can be immunized with a polypeptide of the invention or a cell expressing such peptide. Once an immune response is detected, e.g., antibodies specific for the antigen are detected in the mouse serum, the mouse spleen is harvested and splenocytes isolated. The splenocytes are then fused by well known techniques to any suitable myeloma cells, for example cells from cell line SP20 available from the ATCC. Hybridomas are selected and cloned by limited dilution. The hybridoma clones are then assayed by methods known in the art for cells that secrete antibodies capable of binding a polypeptide of the invention. Ascites fluid, which generally contains high levels of antibodies, can be generated by immunizing mice with positive hybridoma clones.

[1218] Accordingly, the present invention provides methods of generating monoclonal antibodies as well as antibodies produced by the method comprising culturing a hybridoma cell secreting an antibody of the invention wherein, preferably, the hybridoma is generated by fusing splenocytes isolated from a mouse immunized with an antigen of the invention with myeloma cells and then screening the hybridomas resulting from the fusion for hybridoma clones that secrete an antibody able to bind a polypeptide of the invention.

[1219] Another well known method for producing both polyclonal and monoclonal human B cell lines is transformation using Epstein Barr Virus (EBV). Protocols for generating EBV-transformed B cell lines are commonly known in the art, such as, for example, the protocol outlined in Chapter 7.22 of Current Protocols in Immunology, Coligan et al., Eds., 1994, John Wiley & Sons, NY, which is hereby incorporated in its entirety by reference. The source of B cells for transformation is commonly human peripheral blood, but B cells for transformation may also be derived from other sources including, but not limited to, lymph nodes, tonsil, spleen, tumor tissue, and infected tissues. Tissues are generally made into single cell suspensions prior to EBV transformation. Additionally, steps may be taken to either physically remove or inactivate T cells (e.g., by treatment with cyclosporin A) in B cell-containing samples, because T cells from individuals seropositive for anti-EBV antibodies can suppress B cell immortalization by EBV.

[1220] In general, the sample containing human B cells is innoculated with EBV, and cultured for 3-4 weeks. A typical source of EBV is the culture supernatant of the B95-8 cell line (ATCC #VR-1492). Physical signs of EBV transformation can generally be seen towards the end of the 3-4 week culture period. By phase-contrast microscopy, transformed cells may appear large, clear, hairy and tend to aggregate in tight clusters of cells. Initially, EBV lines are generally polyclonal. However, over prolonged periods of cell cultures, EBV lines may become monoclonal or polyclonal as a result of the selective outgrowth of particular B cell clones. Alternatively, polyclonal EBV transformed lines may be subcloned (e.g., by limiting dilution culture) or fused with a suitable fusion partner and plated at limiting dilution to obtain monoclonal B cell lines. Suitable fusion partners for EBV transformed cell lines include mouse myeloma cell lines (e.g., SP2/0, X63-Ag8.653), heteromyeloma cell lines (human×mouse; e.g., SPAM-8, SBC-H20, and CB-F7), and human cell lines (e.g., GM 1500, SKO-007, RPMI 8226, and KR-4). Thus, the present invention also provides a method of generating polyclonal or monoclonal human antibodies against polypeptides of the invention or fragments thereof, comprising EBV-transformation of human B cells.

[1221] Antibody fragments which recognize specific epitopes may be generated by known techniques. For example, Fab and F(ab′)2 fragments of the invention may be produced by proteolytic cleavage of immunoglobulin molecules, using enzymes such as papain (to produce Fab fragments) or pepsin (to produce F(ab′)2 fragments). F(ab′)2 fragments contain the variable region, the light chain constant region and the CH1 domain of the heavy chain.

[1222] For example, the antibodies of the present invention can also be generated using various phage display methods known in the art. In phage display methods, functional antibody domains are displayed on the surface of phage particles which carry the polynucleotide sequences encoding them. In a particular embodiment, such phage can be utilized to display antigen binding domains expressed from a repertoire or combinatorial antibody library (e.g., human or murine). Phage expressing an antigen binding domain that binds the antigen of interest can be selected or identified with antigen, e.g., using labeled antigen or antigen bound or captured to a solid surface or bead. Phage used in these methods are typically filamentous phage including fd and M13 binding domains expressed from phage with Fab, Fv or disulfide stabilized Fv antibody domains recombinantly fused to either the phage gene III or gene VIII protein. Examples of phage display methods that can be used to make the antibodies of the present invention include those disclosed in Brinkman et al., J. Immunol. Methods 182:41-50 (1995); Ames et al., J. Immunol. Methods 184:177-186 (1995); Kettleborough et al., Eur. J. Immunol. 24:952-958 (1994); Persic et al., Gene 187 9-18 (1997); Burton et al., Advances in Immunology 57:191-280 (1994); PCT application No. PCT/GB91/01134; PCT publications WO 90/02809; WO 91/10737; WO 92/01047; WO 92/18619; WO 93/11236; WO 95/15982; WO 95/20401; and U.S. Pat. Nos. 5,698,426; 5,223,409; 5,403,484; 5,580,717; 5,427,908; 5,750,753; 5,821,047; 5,571,698; 5,427,908; 5,516,637; 5,780,225; 5,658,727; 5,733,743 and 5,969,108; each of which is incorporated herein by reference in its entirety.

[1223] As described in the above references, after phage selection, the antibody coding regions from the phage can be isolated and used to generate whole antibodies, including human antibodies, or any other desired antigen binding fragment, and expressed in any desired host, including mammalian cells, insect cells, plant cells, yeast, and bacteria, e.g., as described in detail below. For example, techniques to recombinantly produce Fab, Fab′ and F(ab′)2 fragments can also be employed using methods known in the art such as those disclosed in PCT publication WO 92/22324; Mullinax et al., BioTechniques 12(6):864-869 (1992); and Sawai et al., AJRI 34:26-34 (1995); and Better et al., Science 240:1041-1043 (1988) (said references incorporated by reference in their entireties).

[1224] Examples of techniques which can be used to produce single-chain Fvs and antibodies include those described in U.S. Pat. Nos. 4,946,778 and 5,258,498; Huston et al., Methods in Enzymology 203:46-88 (1991); Shu et al., PNAS 90:7995-7999 (1993); and Skerra et al., Science 240:1038-1040 (1988). For some uses, including in vivo use of antibodies in humans and in vitro detection assays, it may be preferable to use chimeric, humanized, or human antibodies. A chimeric antibody is a molecule in which different portions of the antibody are derived from different animal species, such as antibodies having a variable region derived from a murine monoclonal antibody and a human immunoglobulin constant region. Methods for producing chimeric antibodies are known in the art. See e.g., Morrison, Science 229:1202 (1985); Oi et al., BioTechniques 4:214 (1986); Gillies et al., (1989) J. Immunol. Methods 125:191-202; U.S. Pat. Nos. 5,807,715; 4,816,567; and 4,816,397, which are incorporated herein by reference in their entirety. Humanized antibodies are antibody molecules from non-human species antibody that binds the desired antigen having one or more complementarity determining regions (CDRs) from the non-human species and a framework regions from a human immunoglobulin molecule. Often, framework residues in the human framework regions will be substituted with the corresponding residue from the CDR donor antibody to alter, preferably improve, antigen binding. These framework substitutions are identified by methods well known in the art, e.g., by modeling of the interactions of the CDR and framework residues to identify framework residues important for antigen binding and sequence comparison to identify unusual framework residues at particular positions. (See, e.g., Queen et al., U.S. Pat. No. 5,585,089; Riechmann et al., Nature 332:323 (1988), which are incorporated herein by reference in their entireties.) Antibodies can be humanized using a variety of techniques known in the art including, for example, CDR-grafting (EP 239,400; PCT publication WO 91/09967; U.S. Pat. Nos. 5,225,539; 5,530,101; and 5,585,089), veneering or resurfacing (EP 592,106; EP 519,596; Padlan, Molecular Immunology 28(4/5):489-498 (1991); Studnicka et al., Protein Engineering 7(6):805-814 (1994); Roguska. et al., PNAS 91:969-973 (1994)), and chain shuffling (U.S. Pat. No. 5,565,332).

[1225] Completely human antibodies are particularly desirable for therapeutic treatment of human patients. Human antibodies can be made by a variety of methods known in the art including phage display methods described above using antibody libraries derived from human immunoglobulin sequences. See also, U.S. Pat. Nos. 4,444,887 and 4,716,111; and PCT publications WO 98/46645, WO 98/50433, WO 98/24893, WO 98/16654, WO 96/34096, WO 96/33735, and WO 91/10741; each of which is incorporated herein by reference in its entirety.

[1226] Human antibodies can also be produced using transgenic mice which are incapable of expressing functional endogenous immunoglobulins, but which can express human immunoglobulin genes. For example, the human heavy and light chain immunoglobulin gene complexes may be introduced randomly or by homologous recombination into mouse embryonic stem cells. Alternatively, the human variable region, constant region, and diversity region may be introduced into mouse embryonic stem cells in addition to the human heavy and light chain genes. The mouse heavy and light chain immunoglobulin genes may be rendered non-functional separately or simultaneously with the introduction of human immunoglobulin loci by homologous recombination. In particular, homozygous deletion of the JH region prevents endogenous antibody production. The modified embryonic stem cells are expanded and microinjected into blastocysts to produce chimeric mice. The chimeric mice are then bred to produce homozygous offspring which express human antibodies. The transgenic mice are immunized in the normal fashion with a selected antigen, e.g., all or a portion of a polypeptide of the invention. Monoclonal antibodies directed against the antigen can be obtained from the immunized, transgenic mice using conventional hybridoma technology. The human immunoglobulin transgenes harbored by the transgenic mice rearrange during B cell differentiation, and subsequently undergo class switching and somatic mutation. Thus, using such a technique, it is possible to produce therapeutically useful IgG, IgA, IgM and IgE antibodies. For an overview of this technology for producing human antibodies, see Lonberg and Huszar, Int. Rev. Immunol. 13:65-93 (1995). For a detailed discussion of this technology for producing human antibodies and human monoclonal antibodies and protocols for producing such antibodies, see, e.g., PCT publications WO 98/24893; WO 92/01047; WO 96/34096; WO 96/33735; European Patent No. 0 598 877; U.S. Pat. Nos. 5,413,923; 5,625,126; 5,633,425; 5,569,825; 5,661,016; 5,545,806; 5,814,318; 5,885,793; 5,916,771; 5,939,598; 6,075,181; and 6,114,598, which are incorporated by reference herein in their entirety. In addition, companies such as Abgenix, Inc. (Freemont, Calif.) and Genpharm (San Jose, Calif.) can be engaged to provide human antibodies directed against a selected antigen using technology similar to that described above.

[1227] Completely human antibodies which recognize a selected epitope can be generated using a technique referred to as “guided selection.” In this approach a selected non-human monoclonal antibody, e.g., a mouse antibody, is used to guide the selection of a completely human antibody recognizing the same epitope. (Jespers et al., Bio/technology 12:899-903 (1988)).

[1228] Further, antibodies to the polypeptides of the invention can, in turn, be utilized to generate anti-idiotype antibodies that “mimic” polypeptides of the invention using techniques well known to those skilled in the art. (See, e.g., Greenspan & Bona, FASEB J. 7(5):437-444; (1989) and Nissinoff, J. Immunol. 147(8):2429-2438 (1991)). For example, antibodies which bind to and competitively inhibit polypeptide multimerization and/or binding of a polypeptide of the invention to a ligand can be used to generate anti-idiotypes that “mimic” the polypeptide multimerization and/or binding domain and, as a consequence, bind to and neutralize polypeptide and/or its ligand. Such neutralizing anti-idiotypes or Fab fragments of such anti-idiotypes can be used in therapeutic regimens to neutralize polypeptide ligand(s)/receptor(s). For example, such anti-idiotypic antibodies can be used to bind a polypeptide of the invention and/or to bind its ligand(s)/receptor(s), and thereby block its biological activity. Alternatively, antibodies which bind to and enhance polypeptide multimerization and/or binding, and/or receptor/ligand multimerization, binding and/or signaling can be used to generate anti-idiotypes that function as agonists of a polypeptide of the invention and/or its ligand/receptor. Such agonistic anti-idiotypes or Fab fragments of such anti-idiotypes can be used in therapeutic regimens as agonists of the polypeptides of the invention or its ligand(s)/receptor(s). For example, such anti-idiotypic antibodies can be used to bind a polypeptide of the invention and/or to bind its ligand(s)/receptor(s), and thereby promote or enhance its biological activity.

[1229] Intrabodies of the invention can be produced using methods known in the art, such as those disclosed and reviewed in Chen et al., Hum. Gene Ther. 5:595-601 (1994); Marasco, W. A., Gene Ther. 4:11-15 (1997); Rondon and Marasco, Annu. Rev. Microbiol. 51:257-283 (1997); Proba et al., J. Mol. Biol. 275:245-253 (1998); Cohen et al., Oncogene 17:2445-2456 (1998); Ohage and Steipe, J. Mol. Biol. 291:1119-1128 (1999); Ohage et al., J. Mol. Biol. 291:1129-1134 (1999); Wirtz and Steipe, Protein Sci. 8:2245-2250 (1999); Zhu et al., J. Immunol. Methods 231:207-222 (1999); and references cited therein.

Polynucleotides Encoding Antibodies

[1230] The invention further provides polynucleotides comprising a nucleotide sequence encoding an antibody of the invention and fragments thereof. The invention also encompasses polynucleotides that hybridize under stringent or alternatively, under lower stringency hybridization conditions, e.g., as defined supra, to polynucleotides that encode an antibody, preferably, that specifically binds to a polypeptide of the invention, preferably, an antibody that binds to a polypeptide having the amino acid sequence of SEQ ID NO:Y, to a polypeptide encoded by a portion of SEQ ID NO:X as defined in columns 8 and 9 of Table 2, and/or to a polypeptide encoded by the cDNA contained in ATCC Deposit No:Z.

[1231] The polynucleotides may be obtained, and the nucleotide sequence of the polynucleotides determined, by any method known in the art. For example, if the nucleotide sequence of the antibody is known, a polynucleotide encoding the antibody may be assembled from chemically synthesized oligonucleotides (e.g., as described in Kutmeier et al., BioTechniques 17:242 (1994)), which, briefly, involves the synthesis of overlapping oligonucleotides containing portions of the sequence encoding the antibody, annealing and ligating of those oligonucleotides, and then amplification of the ligated oligonucleotides by PCR.

[1232] Alternatively, a polynucleotide encoding an antibody may be generated from nucleic acid from a suitable source. If a clone containing a nucleic acid encoding a particular antibody is not available, but the sequence of the antibody molecule is known, a nucleic acid encoding the immunoglobulin may be chemically synthesized or obtained from a suitable source (e.g., an antibody cDNA library, or a cDNA library generated from, or nucleic acid, preferably poly A+ RNA, isolated from, any tissue or cells expressing the antibody, such as hybridoma cells selected to express an antibody of the invention) by PCR amplification using synthetic primers hybridizable to the 3′ and 5′ ends of the sequence or by cloning using an oligonucleotide probe specific for the particular gene sequence to identify, e.g., a cDNA clone from a cDNA library that encodes the antibody. Amplified nucleic acids generated by PCR may then be cloned into replicable cloning vectors using any method well known in the art.

[1233] Once the nucleotide sequence and corresponding amino acid sequence of the antibody is determined, the nucleotide sequence of the antibody may be manipulated using methods well known in the art for the manipulation of nucleotide sequences, e.g., recombinant DNA techniques, site directed mutagenesis, PCR, etc. (see, for example, the techniques described in Sambrook et al., 1990, Molecular Cloning, A Laboratory Manual, 2d Ed., Cold Spring Harbor Laboratory, Cold Spring Harbor, N.Y. and Ausubel et al., eds., 1998, Current Protocols in Molecular Biology, John Wiley & Sons, NY, which are both incorporated by reference herein in their entireties), to generate antibodies having a different amino acid sequence, for example to create amino acid substitutions, deletions, and/or insertions.

[1234] In a specific embodiment, the amino acid sequence of the heavy and/or light chain variable domains may be inspected to identify the sequences of the complementarity determining regions (CDRs) by methods that are well know in the art, e.g., by comparison to known amino acid sequences of other heavy and light chain variable regions to determine the regions of sequence hypervariability. Using routine recombinant DNA techniques, one or more of the CDRs may be inserted within framework regions, e.g., into human framework regions to humanize a non-human antibody, as described supra. The framework regions may be naturally occurring or consensus framework regions, and preferably human framework regions (see, e.g., Chothia et al., J. Mol. Biol. 278: 457-479 (1998) for a listing of human framework regions). Preferably, the polynucleotide generated by the combination of the framework regions and CDRs encodes an antibody that specifically binds a polypeptide of the invention. Preferably, as discussed supra, one or more amino acid substitutions may be made within the framework regions, and, preferably, the amino acid substitutions improve binding of the antibody to its antigen. Additionally, such methods may be used to make amino acid substitutions or deletions of one or more variable region cysteine residues participating in an intrachain disulfide bond to generate antibody molecules lacking one or more intrachain disulfide bonds. Other alterations to the polynucleotide are encompassed by the present invention and within the skill of the art.

[1235] In addition, techniques developed for the production of “chimeric antibodies” (Morrison et al., Proc. Natl. Acad. Sci. 81:851-855 (1984); Neuberger et al., Nature 312:604-608 (1984); Takeda et al., Nature 314:452-454 (1985)) by splicing genes from a mouse antibody molecule of appropriate antigen specificity together with genes from a human antibody molecule of appropriate biological activity can be used. As described supra, a chimeric antibody is a molecule in which different portions are derived from different animal species, such as those having a variable region derived from a murine mAb and a human immunoglobulin constant region, e.g., humanized antibodies.

[1236] Alternatively, techniques described for the production of single chain antibodies (U.S. Pat. No. 4,946,778; Bird, Science 242:423-42 (1988); Huston et al., Proc. Natl. Acad. Sci. USA 85:5879-5883 (1988); and Ward et al., Nature 334:544-54 (1989)) can be adapted to produce single chain antibodies. Single chain antibodies are formed by linking the heavy and light chain fragments of the Fv region via an amino acid bridge, resulting in a single chain polypeptide. Techniques for the assembly of functional Fv fragments in E. coli may also be used (Skerra et al., Science 242:1038-1041 (1988)).

Methods of Producing Antibodies

[1237] The antibodies of the invention can be produced by any method known in the art for the synthesis of antibodies, in particular, by chemical synthesis or preferably, by recombinant expression techniques. Methods of producing antibodies include, but are not limited to, hybridoma technology, EBV transformation, and other methods discussed herein as well as through the use recombinant DNA technology, as discussed below.

[1238] Recombinant expression of an antibody of the invention, or fragment, derivative or analog thereof, (e.g., a heavy or light chain of an antibody of the invention or a single chain antibody of the invention), requires construction of an expression vector containing a polynucleotide that encodes the antibody. Once a polynucleotide encoding an antibody molecule or a heavy or light chain of an antibody, or portion thereof (preferably containing the heavy or light chain variable domain), of the invention has been obtained, the vector for the production of the antibody molecule may be produced by recombinant DNA technology using techniques well known in the art. Thus, methods for preparing a protein by expressing a polynucleotide containing an antibody encoding nucleotide sequence are described herein. Methods which are well known to those skilled in the art can be used to construct expression vectors containing antibody coding sequences and appropriate transcriptional and translational control signals. These methods include, for example, in vitro recombinant DNA techniques, synthetic techniques, and in vivo genetic recombination. The invention, thus, provides replicable vectors comprising a nucleotide sequence encoding an antibody molecule of the invention, or a heavy or light chain thereof, or a heavy or light chain variable domain, operably linked to a promoter. Such vectors may include the nucleotide sequence encoding the constant region of the antibody molecule (see, e.g., PCT Publication WO 86/05807; PCT Publication WO 89/01036; and U.S. Pat. No. 5,122,464) and the variable domain of the antibody may be cloned into such a vector for expression of the entire heavy or light chain.

[1239] The expression vector is transferred to a host cell by conventional techniques and the transfected cells are then cultured by conventional techniques to produce an antibody of the invention. Thus, the invention includes host cells containing a polynucleotide encoding an antibody of the invention, or a heavy or light chain thereof, or a single chain antibody of the invention, operably linked to a heterologous promoter. In preferred embodiments for the expression of double-chained antibodies, vectors encoding both the heavy and light chains may be co-expressed in the host cell for expression of the entire immunoglobulin molecule, as detailed below.

[1240] A variety of host-expression vector systems may be utilized to express the antibody molecules of the invention. Such host-expression systems represent vehicles by which the coding sequences of interest may be produced and subsequently purified, but also represent cells which may, when transformed or transfected with the appropriate nucleotide coding sequences, express an antibody molecule of the invention in situ. These include but are not limited to microorganisms such as bacteria (e.g., E. coli, B. subtilis) transformed with recombinant bacteriophage DNA, plasmid DNA or cosmid DNA expression vectors containing antibody coding sequences; yeast (e.g., Saccharomyces, Pichia) transformed with recombinant yeast expression vectors containing antibody coding sequences; insect cell systems infected with recombinant virus expression vectors (e.g., baculovirus) containing antibody coding sequences; plant cell systems infected with recombinant virus expression vectors (e.g., cauliflower mosaic virus, CaMV; tobacco mosaic virus, TMV) or transformed with recombinant plasmid expression vectors (e.g., Ti plasmid) containing antibody coding sequences; or mammalian cell systems (e.g., COS, CHO, BHK, 293, 3T3 cells) harboring recombinant expression constructs containing promoters derived from the genome of mammalian cells (e.g., metallothionein promoter) or from mammalian viruses (e.g., the adenovirus late promoter; the vaccinia virus 7.5K promoter). Preferably, bacterial cells such as Escherichia coli, and more preferably, eukaryotic cells, especially for the expression of whole recombinant antibody molecule, are used for the expression of a recombinant antibody molecule. For example, mammalian cells such as Chinese hamster ovary cells (CHO), in conjunction with a vector such as the major intermediate early gene promoter element from human cytomegalovirus is an effective expression system for antibodies (Foecking et al., Gene 45:101 (1986); Cockett et al., Bio/Technology 8:2 (1990)).

[1241] In bacterial systems, a number of expression vectors may be advantageously selected depending upon the use intended for the antibody molecule being expressed. For example, when a large quantity of such a protein is to be produced, for the generation of pharmaceutical compositions of an antibody molecule, vectors which direct the expression of high levels of fusion protein products that are readily purified may be desirable. Such vectors include, but are not limited, to the E. coli expression vector pUR278 (Ruther et al., EMBO J. 2:1791 (1983)), in which the antibody coding sequence may be ligated individually into the vector in frame with the lac Z coding region so that a fusion protein is produced; pIN vectors (Inouye & Inouye, Nucleic Acids Res. 13:3101-3109 (1985); Van Heeke & Schuster, J. Biol. Chem. 24:5503-5509 (1989)); and the like. pGEX vectors may also be used to express foreign polypeptides as fusion proteins with glutathione S-transferase (GST). In general, such fusion proteins are soluble and can easily be purified from lysed cells by adsorption and binding to matrix glutathione-agarose beads followed by elution in the presence of free glutathione. The pGEX vectors are designed to include thrombin or factor Xa protease cleavage sites so that the cloned target gene product can be released from the GST moiety.

[1242] In an insect system, Autographa californica nuclear polyhedrosis virus (AcNPV) is used as a vector to express foreign genes. The virus grows in Spodoptera frugiperda cells. The antibody coding sequence may be cloned individually into non-essential regions (for example the polyhedrin gene) of the virus and placed under control of an AcNPV promoter (for example the polyhedrin promoter).

[1243] In mammalian host cells, a number of viral-based expression systems may be utilized. In cases where an adenovirus is used as an expression vector, the antibody coding sequence of interest may be ligated to an adenovirus transcription/translation control complex, e.g., the late promoter and tripartite leader sequence. This chimeric gene may then be inserted in the adenovirus genome by in vitro or in vivo recombination. Insertion in a non-essential region of the viral genome (e.g., region E1 or E3) will result in a recombinant virus that is viable and capable of expressing the antibody molecule in infected hosts. (e.g., see Logan & Shenk, Proc. Natl. Acad. Sci. USA 81:355-359 (1984)). Specific initiation signals may also be required for efficient translation of inserted antibody coding sequences. These signals include the ATG initiation codon and adjacent sequences. Furthermore, the initiation codon must be in phase with the reading frame of the desired coding sequence to ensure translation of the entire insert. These exogenous translational control signals and initiation codons can be of a variety of origins, both natural and synthetic. The efficiency of expression may be enhanced by the inclusion of appropriate transcription enhancer elements, transcription terminators, etc. (see Bittner et al., Methods in Enzymol. 153:51-544 (1987)).

[1244] In addition, a host cell strain may be chosen which modulates the expression of the inserted sequences, or modifies and processes the gene product in the specific fashion desired. Such modifications (e.g., glycosylation) and processing (e.g., cleavage) of protein products may be important for the function of the protein. Different host cells have characteristic and specific mechanisms for the post-translational processing and modification of proteins and gene products. Appropriate cell lines or host systems can be chosen to ensure the correct modification and processing of the foreign protein expressed. To this end, eukaryotic host cells which possess the cellular machinery for proper processing of the primary transcript, glycosylation, and phosphorylation of the gene product may be used. Such mammalian host cells include but are not limited to CHO, VERY, BHK, Hela, COS, MDCK, 293, 3T3, WI38, and in particular, breast cancer cell lines such as, for example, BT483, Hs578T, HTB2, BT20 and T47D, and normal mammary gland cell line such as, for example, CRL7030 and Hs578Bst.

[1245] For long-term, high-yield production of recombinant proteins, stable expression is preferred. For example, cell lines which stably express the antibody molecule may be engineered. Rather than using expression vectors which contain viral origins of replication, host cells can be transformed with DNA controlled by appropriate expression control elements (e.g., promoter, enhancer, sequences, transcription terminators, polyadenylation sites, etc.), and a selectable marker. Following the introduction of the foreign DNA, engineered cells may be allowed to grow for 1-2 days in an enriched media, and then are switched to a selective media. The selectable marker in the recombinant plasmid confers resistance to the selection and allows cells to stably integrate the plasmid into their chromosomes and grow to form foci which in turn can be cloned and expanded into cell lines. This method may advantageously be used to engineer cell lines which express the antibody molecule. Such engineered cell lines may be particularly useful in screening and evaluation of compounds that interact directly or indirectly with the antibody molecule.

[1246] A number of selection systems may be used, including but not limited to the herpes simplex virus thymidine kinase (Wigler et al., Cell 11:223 (1977)), hypoxanthine-guanine phosphoribosyltransferase (Szybalska & Szybalski, Proc. Natl. Acad. Sci. USA 48:202 (1992)), and adenine phosphoribosyltransferase (Lowy et al., Cell 22:817 (1980)) genes can be employed in tk-, hgprt- or aprt-cells, respectively. Also, antimetabolite resistance can be used as the basis of selection for the following genes: dhfr, which confers resistance to methotrexate (Wigler et al., Natl. Acad. Sci. USA 77:357 (1980); O'Hare et al., Proc. Natl. Acad. Sci. USA 78:1527 (1981)); gpt, which confers resistance to mycophenolic acid (Mulligan & Berg, Proc. Natl. Acad. Sci. USA 78:2072 (1981)); neo, which confers resistance to the aminoglycoside G-418 Clinical Pharmacy 12:488-505; Wu and Wu, Biotherapy 3:87-95 (1991); Tolstoshev, Ann. Rev. Pharmacol. Toxicol. 32:573-596 (1993); Mulligan, Science 260:926-932 (1993); and Morgan and Anderson, Ann. Rev. Biochem. 62:191-217 (1993); May, 1993, TIB TECH 11(5):155-215 (1993)); and hygro, which confers resistance to hygromycin (Santerre et al., Gene 30:147 (1984)). Methods commonly known in the art of recombinant DNA technology may be routinely applied to select the desired recombinant clone, and such methods are described, for example, in Ausubel et al. (eds.), Current Protocols in Molecular Biology, John Wiley & Sons, NY (1993); Kriegler, Gene Transfer and Expression, A Laboratory Manual, Stockton Press, NY (1990); and in Chapters 12 and 13, Dracopoli et al. (eds), Current Protocols in Human Genetics, John Wiley & Sons, NY (1994); Colberre-Garapin et al., J. Mol. Biol. 150:1 (1981), which are incorporated by reference herein in their entireties.

[1247] The expression levels of an antibody molecule can be increased by vector amplification (for a review, see Bebbington and Hentschel, The use of vectors based on gene amplification for the expression of cloned genes in mammalian cells in DNA cloning, Vol. 3. (Academic Press, New York, 1987)). When a marker in the vector system expressing antibody is amplifiable, increase in the level of inhibitor present in culture of host cell will increase the number of copies of the marker gene. Since the amplified region is associated with the antibody gene, production of the antibody will also increase (Crouse et al., Mol. Cell. Biol. 3:257 (1983)).

[1248] Vectors which use glutamine synthase (GS) or DHFR as the selectable markers can be amplified in the presence of the drugs methionine sulphoximine or methotrexate, respectively. An advantage of glutamine synthase based vectors are the availabilty of cell lines (e.g., the murine myeloma cell line, NS0) which are glutamine synthase negative. Glutamine synthase expression systems can also function in glutamine synthase expressing cells (e.g. Chinese Hamster Ovary (CHO) cells) by providing additional inhibitor to prevent the functioning of the endogenous gene. A glutamine synthase expression system and components thereof are detailed in PCT publications: WO87/04462; WO86/05807; WO89/01036; WO89/10404; and WO91/06657 which are incorporated in their entireties by reference herein. Additionally, glutamine synthase expression vectors that may be used according to the present invention are commercially available from suplliers, including, for example Lonza Biologics, Inc. (Portsmouth, N.H.). Expression and production of monoclonal antibodies using a GS expression system in murine myeloma cells is described in Bebbington et al., Bio/technology 10:169(1992) and in Biblia and Robinson Biotechnol. Prog. 11:1 (1995) which are incorporated in their entirities by reference herein.

[1249] The host cell may be co-transfected with two expression vectors of the invention, the first vector encoding a heavy chain derived polypeptide and the second vector encoding a light chain derived polypeptide. The two vectors may contain identical selectable markers which enable equal expression of heavy and light chain polypeptides. Alternatively, a single vector may be used which encodes, and is capable of expressing, both heavy and light chain polypeptides. In such situations, the light chain should be placed before the heavy chain to avoid an excess of toxic free heavy chain (Proudfoot, Nature 322:52 (1986); Kohler, Proc. Natl. Acad. Sci. USA 77:2197 (1980)). The coding sequences for the heavy and light chains may comprise cDNA or genomic DNA.

[1250] Once an antibody molecule of the invention has been produced by an animal, chemically synthesized, or recombinantly expressed, it may be purified by any method known in the art for purification of an immunoglobulin molecule, for example, by chromatography (e.g., ion exchange, affinity, particularly by affinity for the specific antigen after Protein A, and sizing column chromatography), centrifugation, differential solubility, or by any other standard technique for the purification of proteins. In addition, the antibodies of the present invention or fragments thereof can be fused to heterologous polypeptide sequences described herein or otherwise known in the art, to facilitate purification.

[1251] The present invention encompasses antibodies recombinantly fused or chemically conjugated (including both covalently and non-covalently conjugations) to a polypeptide (or portion thereof, preferably at least 10, 20, 30, 40, 50, 60, 70, 80, 90 or 100 amino acids of the polypeptide) of the present invention to generate fusion proteins. The fusion does not necessarily need to be direct, but may occur through linker sequences. The antibodies may be specific for antigens other than polypeptides (or portion thereof, preferably at least 10, 20, 30, 40, 50, 60, 70, 80, 90 or 100 amino acids of the polypeptide) of the present invention. For example, antibodies may be used to target the polypeptides of the present invention to particular cell types, either in vitro or in vivo, by fusing or conjugating the polypeptides of the present invention to antibodies specific for particular cell surface receptors. Antibodies fused or conjugated to the polypeptides of the present invention may also be used in in vitro immunoassays and purification methods using methods known in the art. See e.g., Harbor et al., supra, and PCT publication WO 93/21232; EP 439,095; Naramura et al., Immunol. Lett. 39:91-99 (1994); U.S. Pat. No. 5,474,981; Gillies et al., PNAS 89:1428-1432 (1992); Fell et al., J. Immunol. 146:2446-2452 (1991), which are incorporated by reference in their entireties.

[1252] The present invention further includes compositions comprising the polypeptides of the present invention fused or conjugated to antibody domains other than the variable regions. For example, the polypeptides of the present invention may be fused or conjugated to an antibody Fc region, or portion thereof. The antibody portion fused to a polypeptide of the present invention may comprise the constant region, hinge region, CH1 domain, CH2 domain, and CH3 domain or any combination of whole domains or portions thereof. The polypeptides may also be fused or conjugated to the above antibody portions to form multimers. For example, Fc portions fused to the polypeptides of the present invention can form dimers through disulfide bonding between the Fc portions. Higher multimeric forms can be made by fusing the polypeptides to portions of IgA and IgM. Methods for fusing or conjugating the polypeptides of the present invention to antibody portions are known in the art. See, e.g., U.S. Pat. Nos. 5,336,603; 5,622,929; 5,359,046; 5,349,053; 5,447,851; 5,112,946; EP 307,434; EP 367,166; PCT publications WO 96/04388; WO 91/06570; Ashkenazi et al., Proc. Natl. Acad. Sci. USA 88:10535-10539 (1991); Zheng et al., J. Immunol. 154:5590-5600 (1995); and Vil et al., Proc. Natl. Acad. Sci. USA 89:11337-11341 (1992) (said references incorporated by reference in their entireties).

[1253] As discussed, supra, the polypeptides corresponding to a polypeptide, polypeptide fragment, or a variant of SEQ ID NO:Y may be fused or conjugated to the above antibody portions to increase the in vivo half life of the polypeptides or for use in immunoassays using methods known in the art. Further, the polypeptides corresponding to SEQ ID NO:Y may be fused or conjugated to the above antibody portions to facilitate purification. One reported example describes chimeric proteins consisting of the first two domains of the human CD4-polypeptide and various domains of the constant regions of the heavy or light chains of mammalian immunoglobulins. See EP 394,827; and Traunecker et al., Nature 331:84-86 (1988). The polypeptides of the present invention fused or conjugated to an antibody having disulfide-linked dimeric structures (due to the IgG) may also be more efficient in binding and neutralizing other molecules, than the monomeric secreted protein or protein fragment alone. See, for example, Fountoulakis et al., J. Biochem. 270:3958-3964 (1995). In many cases, the Fc part in a fusion protein is beneficial in therapy and diagnosis, and thus can result in, for example, improved pharmacokinetic properties. See, for example, EP A 232,262. Alternatively, deleting the Fc part after the fusion protein has been expressed, detected, and purified, would be desired. For example, the Fc portion may hinder therapy and diagnosis if the fusion protein is used as an antigen for immunizations. In drug discovery, for example, human proteins, such as hIL-5, have been fused with Fc portions for the purpose of high-throughput screening assays to identify antagonists of hIL-5. (See, Bennett et al., J. Molecular Recognition 8:52-58 (1995); Johanson et al., J. Biol. Chem. 270:9459-9471 (1995)).

[1254] Moreover, the antibodies or fragments thereof of the present invention can be fused to marker sequences, such as a peptide to facilitate purification. In preferred embodiments, the marker amino acid sequence is a hexa-histidine peptide, such as the tag provided in a pQE vector (QIAGEN, Inc., 9259 Eton Avenue, Chatsworth, Calif., 91311), among others, many of which are commercially available. As described in Gentz et al., Proc. Natl. Acad. Sci. USA 86:821-824 (1989), for instance, hexa-histidine provides for convenient purification of the fusion protein. Other peptide tags useful for purification include, but are not limited to, the “HA” tag, which corresponds to an epitope derived from the influenza hemagglutinin protein (Wilson et al., Cell 37:767 (1984)) and the “flag” tag.

[1255] The present invention further encompasses antibodies or fragments thereof conjugated to a diagnostic or therapeutic agent. The antibodies can be used diagnostically to, for example, monitor the development or progression of a tumor as part of a clinical testing procedure to, e.g., determine the efficacy of a given treatment regimen. Detection can be facilitated by coupling the antibody to a detectable substance. Examples of detectable substances include various enzymes, prosthetic groups, fluorescent materials, luminescent materials, bioluminescent materials, radioactive materials, positron emitting metals using various positron emission tomographies, and nonradioactive paramagnetic metal ions. The detectable substance may be coupled or conjugated either directly to the antibody (or fragment thereof) or indirectly, through an intermediate (such as, for example, a linker known in the art) using techniques known in the art. See, for example, U.S. Pat. No. 4,741,900 for metal ions which can be conjugated to antibodies for use as diagnostics according to the present invention. Examples of suitable enzymes include horseradish peroxidase, alkaline phosphatase, beta-galactosidase, or acetylcholinesterase; examples of suitable prosthetic group complexes include streptavidin/biotin and avidin/biotin; examples of suitable fluorescent materials include umbelliferone, fluorescein, fluorescein isothiocyanate, rhodamine, dichlorotriazinylamine fluorescein, dansyl chloride or phycoerythrin; an example of a luminescent material includes luminol; examples of bioluminescent materials include luciferase, luciferin, and aequorin; and examples of suitable radioactive material include 125I, 131I, 111In or 99Tc.

[1256] Further, an antibody or fragment thereof may be conjugated to a therapeutic moiety such as a cytotoxin, e.g., a cytostatic or cytocidal agent, a therapeutic agent or a radioactive metal ion, e.g., alpha-emitters such as, for example, 213Bi. A cytotoxin or cytotoxic agent includes any agent that is detrimental to cells. Examples include paclitaxol, cytochalasin B, gramicidin D, ethidium bromide, emetine, mitomycin, etoposide, tenoposide, vincristine, vinblastine, colchicin, doxorubicin, daunorubicin, dihydroxy anthracin dione, mitoxantrone, mithramycin, actinomycin D, 1-dehydrotestosterone, glucocorticoids, procaine, tetracaine, lidocaine, propranolol, and puromycin and analogs or homologs thereof. Therapeutic agents include, but are not limited to, antimetabolites (e.g., methotrexate, 6-mercaptopurine, 6-thioguanine, cytarabine, 5-fluorouracil decarbazine), alkylating agents (e.g., mechlorethamine, thioepa chlorambucil, melphalan, carmustine (BSNU) and lomustine (CCNU), cyclothosphamide, busulfan, dibromomannitol, streptozotocin, mitomycin C, and cis-dichlorodiamine platinum (II) (DDP) cisplatin), anthracyclines (e.g., daunorubicin (formerly daunomycin) and doxorubicin), antibiotics (e.g., dactinomycin (formerly actinomycin), bleomycin, mithramycin, and anthramycin (AMC)), and anti-mitotic agents (e.g., vincristine and vinblastine).

[1257] The conjugates of the invention can be used for modifying a given biological response, the therapeutic agent or drug moiety is not to be construed as limited to classical chemical therapeutic agents. For example, the drug moiety may be a protein or polypeptide possessing a desired biological activity. Such proteins may include, for example, a toxin such as abrin, ricin A, pseudomonas exotoxin, or diphtheria toxin; a protein such as tumor necrosis factor, a-interferon, β-interferon, nerve growth factor, platelet derived growth factor, tissue plasminogen activator, an apoptotic agent, e.g., TNF-alpha, TNF-beta, AIM I (See, International Publication No. WO 97/33899), AIM II (See, International Publication No. WO 97/34911), Fas Ligand (Takahashi et al., Int. Immunol., 6:1567-1574 (1994)), VEGI (See, International Publication No. WO 99/23105), a thrombotic agent or an anti-angiogenic agent, e.g., angiostatin or endostatin; or, biological response modifiers such as, for example, lymphokines, interleukin-1 (“IL-1”), interleukin-2 (“IL-2”), interleukin-6 (“IL-6”), granulocyte macrophage colony stimulating factor (“GM-CSF”), granulocyte colony stimulating factor (“G-CSF”), or other growth factors.

[1258] Antibodies may also be attached to solid supports, which are particularly useful for immunoassays or purification of the target antigen. Such solid supports include, but are not limited to, glass, cellulose, polyacrylamide, nylon, polystyrene, polyvinyl chloride or polypropylene.

[1259] Techniques for conjugating such therapeutic moiety to antibodies are well known. See, for example, Arnon et al., “Monoclonal Antibodies For Immunotargeting Of Drugs In Cancer Therapy”, in Monoclonal Antibodies And Cancer Therapy, Reisfeld et al. (eds.), pp. 243-56 (Alan R. Liss, Inc. 1985); Hellstrom et al., “Antibodies For Drug Delivery”, in Controlled Drug Delivery (2nd Ed.), Robinson et al. (eds.), pp. 623-53 (Marcel Dekker, Inc. 1987); Thorpe, “Antibody Carriers Of Cytotoxic Agents In Cancer Therapy: A Review”, in Monoclonal Antibodies '84: Biological And Clinical Applications, Pinchera et al. (eds.), pp. 475-506 (1985); “Analysis, Results, And Future Prospective Of The Therapeutic Use Of Radiolabeled Antibody In Cancer Therapy”, in Monoclonal Antibodies For Cancer Detection And Therapy, Baldwin et al. (eds.), pp. 303-16 (Academic Press 1985), and Thorpe et al., “The Preparation And Cytotoxic Properties Of Antibody-Toxin Conjugates”, Immunol. Rev. 62:119-58 (1982).

[1260] Alternatively, an antibody can be conjugated to a second antibody to form an antibody heteroconjugate as described by Segal in U.S. Pat. No. 4,676,980, which is incorporated herein by reference in its entirety.

[1261] An antibody, with or without a therapeutic moiety conjugated to it, administered alone or in combination with cytotoxic factor(s) and/or cytokine(s) can be used as a therapeutic.

Immunophenotyping

[1262] The antibodies of the invention may be utilized for immunophenotyping of cell lines and biological samples. Translation products of the gene of the present invention may be useful as cell-specific markers, or more specifically as cellular markers that are differentially expressed at various stages of differentiation and/or maturation of particular cell types. Monoclonal antibodies directed against a specific epitope, or combination of epitopes, will allow for the screening of cellular populations expressing the marker. Various techniques can be utilized using monoclonal antibodies to screen for cellular populations expressing the marker(s), and include magnetic separation using antibody-coated magnetic beads, “panning” with antibody attached to a solid matrix (i.e., plate), and flow cytometry (See, e.g., U.S. Pat. No. 5,985,660; and Morrison et al., Cell, 96:737-49 (1999)).

[1263] These techniques allow for the screening of particular populations of cells, such as might be found with hematological malignancies (i.e. minimal residual disease (MRD) in acute leukemic patients) and “non-self” cells in transplantations to prevent Graft-versus-Host Disease (GVHD). Alternatively, these techniques allow for the screening of hematopoietic stem and progenitor cells capable of undergoing proliferation and/or differentiation, as might be found in human umbilical cord blood.

Assays For Antibody Binding

[1264] The antibodies of the invention may be assayed for immunospecific binding by any method known in the art. The immunoassays which can be used include but are not limited to competitive and non-competitive assay systems using techniques such as western blots, radioimmunoassays, ELISA (enzyme linked immunosorbent assay), “sandwich” immunoassays, immunoprecipitation assays, precipitin reactions, gel diffusion precipitin reactions, immunodiffusion assays, agglutination assays, complement-fixation assays, immunoradiometric assays, fluorescent immunoassays, and protein A immunoassays, to name but a few. Such assays are routine and well known in the art (see, e.g., Ausubel et al., eds, 1994, Current Protocols in Molecular Biology, Vol. 1, John Wiley & Sons, Inc., New York, which is incorporated by reference herein in its entirety). Exemplary immunoassays are described briefly below (but are not intended by way of limitation).

[1265] Immunoprecipitation protocols generally comprise lysing a population of cells in a lysis buffer such as RIPA buffer (1% NP-40 or Triton X-100, 1% sodium deoxycholate, 0.1% SDS, 0.15 M NaCl, 0.01 M sodium phosphate at pH 7.2, 1% Trasylol) supplemented with protein phosphatase and/or protease inhibitors (e.g., EDTA, PMSF, aprotinin, sodium vanadate), adding the antibody of interest to the cell lysate, incubating for a period of time (e.g., 1-4 hours) at 4° C., adding protein A and/or protein G sepharose beads to the cell lysate, incubating for about an hour or more at 4° C., washing the beads in lysis buffer and resuspending the beads in SDS/sample buffer. The ability of the antibody of interest to immunoprecipitate a particular antigen can be assessed by, e.g., western blot analysis. One of skill in the art would be knowledgeable as to the parameters that can be modified to increase the binding of the antibody to an antigen and decrease the background (e.g., pre-clearing the cell lysate with sepharose beads). For further discussion regarding immunoprecipitation protocols see, e.g., Ausubel et al., eds., (1994), Current Protocols in Molecular Biology, Vol. 1, John Wiley & Sons, Inc., New York, section 10.16.1.

[1266] Western blot analysis generally comprises preparing protein samples, electrophoresis of the protein samples in a polyacrylamide gel (e.g., 8%-20% SDS-PAGE depending on the molecular weight of the antigen), transferring the protein sample from the polyacrylamide gel to a membrane such as nitrocellulose, PVDF or nylon, blocking the membrane in blocking solution (e.g., PBS with 3% BSA or non-fat milk), washing the membrane in washing buffer (e.g., PBS-Tween 20), blocking the membrane with primary antibody (the antibody of interest) diluted in blocking buffer, washing the membrane in washing buffer, blocking the membrane with a secondary antibody (which recognizes the primary antibody, e.g., an anti-human antibody) conjugated to an enzymatic substrate (e.g., horseradish peroxidase or alkaline phosphatase) or radioactive molecule (e.g., 32P or 125I) diluted in blocking buffer, washing the membrane in wash buffer, and detecting the presence of the antigen. One of skill in the art would be knowledgeable as to the parameters that can be modified to increase the signal detected and to reduce the background noise. For further discussion regarding western blot protocols see, e.g., Ausubel et al., eds, (1994), Current Protocols in Molecular Biology, Vol. 1, John Wiley & Sons, Inc., New York, section 10.8.1.

[1267] ELISAs comprise preparing antigen, coating the well of a 96 well microtiter plate with the antigen, adding the antibody of interest conjugated to a detectable compound such as an enzymatic substrate (e.g., horseradish peroxidase or alkaline phosphatase) to the well and incubating for a period of time, and detecting the presence of the antigen. In ELISAs the antibody of interest does not have to be conjugated to a detectable compound; instead, a second antibody (which recognizes the antibody of interest) conjugated to a detectable compound may be added to the well. Further, instead of coating the well with the antigen, the antibody may be coated to the well. In this case, a second antibody conjugated to a detectable compound may be added following the addition of the antigen of interest to the coated well. One of skill in the art would be knowledgeable as to the parameters that can be modified to increase the signal detected as well as other variations of ELISAs known in the art. For further discussion regarding ELISAs see, e.g., Ausubel et al., eds, (1994), Current Protocols in Molecular Biology, Vol. 1, John Wiley & Sons, Inc., New York, section 11.2.1.

[1268] The binding affinity of an antibody to an antigen and the off-rate of an antibody-antigen interaction can be determined by competitive binding assays. One example of a competitive binding assay is a radioimmunoassay comprising the incubation of labeled antigen (e.g., 3H or 125I) with the antibody of interest in the presence of increasing amounts of unlabeled antigen, and the detection of the antibody bound to the labeled antigen. The affinity of the antibody of interest for a particular antigen and the binding off-rates can be determined from the data by scatchard plot analysis. Competition with a second antibody can also be determined using radioimmunoassays. In this case, the antigen is incubated with antibody of interest conjugated to a labeled compound (e.g., 3H or 125I) in the presence of increasing amounts of an unlabeled second antibody.

[1269] Antibodies of the invention may be characterized using immunocytochemisty methods on cells (e.g., mammalian cells, such as CHO cells) transfected with a vector enabling the expression of an antigen or with vector alone using techniques commonly known in the art. Antibodies that bind antigen transfected cells, but not vector-only transfected cells, are antigen specific.

Therapeutic Uses

[1270] Table 1D: In preferred embodiments, the present invention encompasses a method of treating a disease or disorder listed in the “Preferred Indications” column of Table 1D; comprising administering to a patient in which such treatment, prevention, or amelioration is desired a protein, nucleic acid, or antibody of the invention (or fragment or variant thereof) represented by Table 1A and Table 1D (in the same row as the disease or disorder to be treated is listed in the “Preferred Indications” column of Table 1D) in an amount effective to treat, prevent, or ameliorate the disease or disorder.

[1271] As indicated in Table 1D, the polynucleotides, polypeptides, agonists, or antagonists of the present invention (including antibodies) can be used in assays to test for one or more biological activities. If these polynucleotides and polypeptides do exhibit activity in a particular assay, it is likely that these molecules may be involved in the diseases associated with the biological activity. Thus, the polynucleotides or polypeptides, or agonists or antagonists thereof (including antibodies) could be used to treat the associated disease.

[1272] The present invention encompasses methods of preventing, treating, diagnosing, or ameliorating a disease or disorder. In preferred embodiments, the present invention encompasses a method of treating a disease or disorder listed in the “Preferred Indications” column of Table 1D; comprising administering to a patient in which such treatment, prevention, or amelioration is desired a protein, nucleic acid, or antibody of the invention (or fragment or variant thereof) in an amount effective to treat, prevent, diagnose, or ameliorate the disease or disorder. The first and seccond columns of Table 1D show the “Gene No.” and “cDNA Clone ID No.”, respectively, indicating certain nucleic acids and proteins (or antibodies against the same) of the invention (including polynucleotide, polypeptide, and antibody fragments or variants thereof) that may be used in preventing, treating, diagnosing, or ameliorating the disease(s) or disorder(s) indicated in the corresponding row in Column 3 of Table 1D.

[1273] In another embodiment, the present invention also encompasses methods of preventing, treating, diagnosing, or ameliorating a disease or disorder listed in the “Preferred Indications” column of Table 1D; comprising administering to a patient combinations of the proteins, nucleic acids, or antibodies of the invention (or fragments or variants thereof), sharing similar indications as shown in the corresponding rows in Column 3 of Table 1D.

[1274] The “Preferred Indication” column describes diseases, disorders, and/or conditions that may be treated, prevented, diagnosed, or ameliorated by a protein, nucleic acid, or antibody of the invention (or fragment or variant thereof).

[1275] The recitation of “Cancer” in the “Preferred Indication” column indicates that the corresponding nucleic acid and protein, or antibody against the same, of the invention (or fragment or variant thereof) may be used for example, to diagnose, treat, prevent, and/or ameliorate diseases and/or disorders relating to neoplastic diseases (e.g., leukemias, cancers, and/or as described below under “Hyperproliferative Disorders”).

[1276] In specific embodiments, a protein, nucleic acid, or antibody of the invention (or fragment or variant thereof) having a “Cancer” recitation in the “Preferred Indication” column of Table 1D may be used for example, to diagnose, treat, prevent, and/or ameliorate a neoplasm located in a tissue selected from the group consisting of: colon, abdomen, bone, breast, digestive system, liver, pancreas, prostate, peritoneum, lung, blood (e.g., leukemia), endocrine glands (adrenal, parathyroid, pituitary, testicles, ovary, thymus, thyroid), uterus, eye, head and neck, nervous (central and peripheral), lymphatic system, pelvic, skin, soft tissue, spleen, thoracic, and urogenital.

[1277] In specific embodiments, a protein, nucleic acid, or antibody of the invention (or fragment or variant thereof) having a “Cancer” recitation in the “Preferred Indication” column of Table 1D, may be used for example, to diagnose, treat, prevent, and/or ameliorate a pre-neoplastic condition, selected from the group consisting of: hyperplasia (e.g., endometrial hyperplasia and/or as described in the section entitled “Hyperproliferative Disorders”), metaplasia (e.g., connective tissue metaplasia, atypical metaplasia, and/or as described in the section entitled “Hyperproliferative Disorders”), and/or dysplasia (e.g., cervical dysplasia, and bronchopulmonary dysplasia).

[1278] In another specific embodiment, a protein, nucleic acid, or antibody of the invention (or fragment or variant thereof) having a “Cancer” recitation in the “Preferred Indication” column of Table 1D, may be used for example, to diagnose, treat, prevent, and/or ameliorate a benign dysproliferative disorder selected from the group consisting of: benign tumors, fibrocystic conditions, tissue hypertrophy, and/or as described in the section entitled “Hyperproliferative Disorders”.

[1279] The recitation of “Immune/Hematopoietic” in the “Preferred Indication” column indicates that the corresponding nucleic acid and protein, or antibody against the same, of the invention (or fragment or variant thereof), may be used for example, to diagnose, treat, prevent, and/or ameliorate diseases and/or disorders relating to neoplastic diseases (e.g., as described below under “Hyperproliferative Disorders”), blood disorders (e.g., as described below under “Immune Activity” “Cardiovascular Disorders” and/or “Blood-Related Disorders”), and infections (e.g., as described below under “Infectious Disease”).

[1280] In specific embodiments, a protein, nucleic acid, or antibody of the invention (or fragment or variant thereof) having the “Immune/Hematopoietic” recitation in the “Preferred Indication” column of Table 1D, may be used for example, to diagnose, treat, prevent, and/or ameliorate a disease or disorder selected from the group consisting of: anemia, pancytopenia, leukopenia, thrombocytopenia, leukemias, Hodgkin's disease, non-Hodgkin's lymphoma, acute lymphocytic anemia (ALL), plasmacytomas, multiple myeloma, Burkitt's lymphoma, arthritis, asthma, AIDS, autoimmune disease, rheumatoid arthritis, granulomatous disease, immune deficiency, inflammatory bowel disease, sepsis, neutropenia, neutrophilia, psoriasis, immune reactions to transplanted organs and tissues, systemic lupus erythematosis, hemophilia, hypercoagulation, diabetes mellitus, endocarditis, meningitis, Lyme Disease, and allergies.

[1281] The recitation of “Reproductive” in the “Preferred Indication” column indicates that the corresponding nucleic acid and protein, or antibody against the same, of the invention (or fragment or variant thereof), may be used for example, to diagnose, treat, prevent, and/or ameliorate diseases and/or disorders relating to neoplastic diseases (e.g., as described below under “Hyperproliferative Disorders”), and disorders of the reproductive system (e.g., as described below under “Reproductive System Disorders”).

[1282] In specific embodiments, a protein, nucleic acid, or antibody of the invention (or fragment or variant thereof) having a “Reproductive” recitation in the “Preferred Indication” column of Table 1D, may be used for example, to diagnose, treat, prevent, and/or ameliorate a disease or disorder selected from the group consisting of: cryptorchism, prostatitis, inguinal hernia, varicocele, leydig cell tumors, verrucous carcinoma, prostatitis, malacoplakia, Peyronie's disease, penile carcinoma, squamous cell hyperplasia, dysmenorrhea, ovarian adenocarcinoma, Turner's syndrome, mucopurulent cervicitis, Sertoli-leydig tumors, ovarian cancer, uterine cancer, pelvic inflammatory disease, testicular cancer, prostate cancer, Klinefelter's syndrome, Young's syndrome, premature ejaculation, diabetes mellitus, cystic fibrosis, Kartagener's syndrome, testicular atrophy, testicular feminization, anorchia, ectopic testis, epididymitis, orchitis, gonorrhea, syphilis, testicular torsion, vasitis nodosa, germ cell tumors, stromal tumors, dysmenorrhea, retroverted uterus, endometriosis, fibroids, adenomyosis, anovulatory bleeding, amenorrhea, Cushing's syndrome, hydatidiform moles, Asherman's syndrome, premature menopause, precocious puberty, uterine polyps, dysfunctional uterine bleeding, cervicitis, chronic cervicitis, mucopurulent cervicitis, cervical dysplasia, cervical polyps, Nabothian cysts, cervical erosion, cervical incompetence, cervical neoplasms, pseudohermaphroditism, and premenstrual syndrome.

[1283] The recitation of “Musculoskeletal” in the “Preferred Indication” column indicates that the corresponding nucleic acid and protein, or antibody against the same, of the invention (or fragment or variant thereof), may be used for example, to diagnose, treat, prevent, and/or ameliorate diseases and/or disorders relating to neoplastic diseases (e.g., as described below under “Hyperproliferative Disorders”), and disorders of the immune system (e.g., as described below under “Immune Activity”).

[1284] In specific embodiments, a protein, nucleic acid, or antibody of the invention (or fragment or variant thereof) having a “Musculoskeletal” recitation in the “Preferred Indication” column of Table 1D, may be used for example, to diagnose, treat, prevent, and/or ameliorate a disease or disorder selected from the group consisting of: bone cancers (e.g., osteochondromas, benign chondromas, chondroblastoma, chondromyxoid fibromas, osteoid osteomas, giant cell tumors, multiple myeloma, osteosarcomas), Paget's Disease, rheumatoid arthritis, systemic lupus erythematosus, osteomyelitis, Lyme Disease, gout, bursitis, tendonitis, osteoporosis, osteoarthritis, muscular dystrophy, mitochondrial myopathy, cachexia, and multiple sclerosis.

[1285] The recitation of “Cardiovascular” in the “Preferred Indication” column indicates that the corresponding nucleic acid and protein, or antibody against the same, of the invention (or fragment or variant thereof), may be used for example, to diagnose, treat, prevent, and/or ameliorate diseases and/or disorders relating to neoplastic diseases (e.g., as described below under “Hyperproliferative Disorders”), and disorders of the cardiovascular system (e.g., as described below under “Cardiovascular Disorders”).

[1286] In specific embodiments, a protein, nucleic acid, or antibody of the invention (or fragment or variant thereof) having a “Cardiovascular” recitation in the “Preferred Indication” column of Table 1D, may be used for example, to diagnose, treat, prevent, and/or ameliorate a disease or disorder selected from the group consisting of: myxomas, fibromas, rhabdomyomas, cardiovascular abnormalities (e.g., congenital heart defects, cerebral arteriovenous malformations, septal defects), heart disease (e.g., heart failure, congestive heart disease, arrhythmia, tachycardia, fibrillation, pericardial Disease, endocarditis), cardiac arrest, heart valve disease (e.g., stenosis, regurgitation, prolapse), vascular disease (e.g., hypertension, coronary artery disease, angina, aneurysm, arteriosclerosis, peripheral vascular disease), hyponatremia, hypematremia, hypokalemia, and hyperkalemia.

[1287] The recitation of “Mixed Fetal” in the “Preferred Indication” column indicates that the corresponding nucleic acid and protein, or antibody against the same, of the invention (or fragment or variant thereof), may be used for example, to diagnose, treat, prevent, and/or ameliorate diseases and/or disorders relating to neoplastic diseases (e.g., as described below under “Hyperproliferative Disorders”).

[1288] In specific embodiments, a protein, nucleic acid, or antibody of the invention (or fragment or variant thereof) having a “Mixed Fetal” recitation in the “Preferred Indication” column of Table 1D, may be used for example, to diagnose, treat, prevent, and/or ameliorate a disease or disorder selected from the group consisting of: spina bifida, hydranencephaly, neurofibromatosis, fetal alcohol syndrome, diabetes mellitus, PKU, Down's syndrome, Patau syndrome, Edwards syndrome, Turner syndrome, Apert syndrome, Carpenter syndrome, Conradi syndrome, Crouzon syndrome, cutis laxa, Cornelia de Lange syndrome, Ellis-van Creveld syndrome, Holt-Oram syndrome, Kartagener syndrome, Meckel-Gruber syndrome, Noonan syndrome, Pallister-Hall syndrome, Rubinstein-Taybi syndrome, Scimitar syndrome, Smith-Lemli-Opitz syndrome, thromocytopenia-absent radius (TAR) syndrome, Treacher Collins syndrome, Williams syndrome, Hirschsprung's disease, Meckel's diverticulum, polycystic kidney disease, Turner's syndrome, and gonadal dysgenesis, Klippel-Feil syndrome, Ostogenesis imperfecta, muscular dystrophy, Tay-Sachs disease, Wilm's tumor, neuroblastoma, and retinoblastoma.

[1289] The recitation of “Excretory” in the “Preferred Indication” column indicates that the corresponding nucleic acid and protein, or antibody against the same, of the invention (or fragment or variant thereof), may be used for example, to diagnose, treat, prevent, and/or ameliorate diseases and/or disorders relating to neoplastic diseases (e.g., as described below under “Hyperproliferative Disorders”) and renal disorders (e.g., as described below under “Renal Disorders”).

[1290] In specific embodiments, a protein, nucleic acid, or antibody of the invention (or fragment or variant thereof) having a “Excretory” recitation in the “Preferred Indication” column of Table 1D, may be used for example, to diagnose, treat, prevent, and/or ameliorate a disease or disorder selected from the group consisting of: bladder cancer, prostate cancer, benign prostatic hyperplasia, bladder disorders (e.g., urinary incontinence, urinary retention, urinary obstruction, urinary tract Infections, interstitial cystitis, prostatitis, neurogenic bladder, hematuria), renal disorders (e.g., hydronephrosis, proteinuria, renal failure, pyelonephritis, urolithiasis, reflux nephropathy, and unilateral obstructive uropathy).

[1291] The recitation of “Neural/Sensory” in the “Preferred Indication” column indicates that the corresponding nucleic acid and protein, or antibody against the same, of the invention (or fragment or variant thereof), may be used for example, to diagnose, treat, prevent, and/or ameliorate diseases and/or disorders relating to neoplastic diseases (e.g., as described below under “Hyperproliferative Disorders”) and diseases or disorders of the nervous system (e.g., as described below under “Neural Activity and Neurological Diseases”).

[1292] In specific embodiments, a protein, nucleic acid, or antibody of the invention (or fragment or variant thereof) having a “Neural/Sensory” recitation in the “Preferred Indication” column of Table 1D, may be used for example, to diagnose, treat, prevent, and/or ameliorate a disease or disorder selected from the group consisting of: brain cancer (e.g., brain stem glioma, brain tumors, central nervous system (Primary) lymphoma, central nervous system lymphoma, cerebellar astrocytoma, and cerebral astrocytoma, neurodegenerative disorders (e.g., Alzheimer's Disease, Creutzfeldt-Jakob Disease, Parkinson's Disease, and Idiopathic Presenile Dementia), encephalomyelitis, cerebral malaria, meningitis, metabolic brain diseases (e.g., phenylketonuria and pyruvate carboxylase deficiency), cerebellar ataxia, ataxia telangiectasia, and AIDS Dementia Complex, schizophrenia, attention deficit disorder, hyperactive attention deficit disorder, autism, and obsessive compulsive disorders.

[1293] The recitation of “Respiratory” in the “Preferred Indication” column indicates that the corresponding nucleic acid and protein, or antibody against the same, of the invention (or fragment or variant thereof), may be used for example, to diagnose, treat, prevent, and/or ameliorate diseases and/or disorders relating to neoplastic diseases (e.g., as described below under “Hyperproliferative Disorders”) and diseases or disorders of the respiratory system (e.g., as described below under “Respiratory Disorders”).

[1294] In specific embodiments, a protein, nucleic acid, or antibody of the invention (or fragment or variant thereof) having a “Respiratory” recitation in the “Preferred Indication” column of Table 1D, may be used for example, to diagnose, treat, prevent, and/or ameliorate a disease or disorder selected from the group consisting of: cancers of the respiratory system such as larynx cancer, pharynx cancer, trachea cancer, epiglottis cancer, lung cancer, squamous cell carcinomas, small cell (oat cell) carcinomas, large cell carcinomas, and adenocarcinomas. Allergic reactions, cystic fibrosis, sarcoidosis, histiocytosis X, infiltrative lung diseases (e.g., pulmonary fibrosis and lymphoid interstitial pneumonia), obstructive airway diseases (e.g., asthma, emphysema, chronic or acute bronchitis), occupational lung diseases (e.g., silicosis and asbestosis), pneumonia, and pleurisy.

[1295] The recitation of “Endocrine” in the “Preferred Indication” column indicates that the corresponding nucleic acid and protein, or antibody against the same, of the invention (or fragment or variant thereof), may be used for example, to diagnose, treat, prevent, and/or ameliorate diseases and/or disorders relating to neoplastic diseases (e.g., as described below under “Hyperproliferative Disorders”) and diseases or disorders of the respiratory system (e.g., as described below under “Respiratory Disorders”), renal disorders (e.g., as described below under “Renal Disorders”), and disorders of the endocrine system (e.g., as described below under “Endocrine Disorders”.

[1296] In specific embodiments, a protein, nucleic acid, or antibody of the invention (or fragment or variant thereof) having an “Endocrine” recitation in the “Preferred Indication” column of Table 1D, may be used for example, to diagnose, treat, prevent, and/or ameliorate a disease or disorder selected from the group consisting of: cancers of endocrine tissues and organs (e.g., cancers of the hypothalamus, pituitary gland, thyroid gland, parathyroid glands, pancreas, adrenal glands, ovaries, and testes), diabetes (e.g., diabetes insipidus, type I and type II diabetes mellitus), obesity, disorders related to pituitary glands (e.g., hyperpituitarism, hypopituitarism, and pituitary dwarfism), hypothyroidism, hyperthyroidism, goiter, reproductive disorders (e.g. male and female infertility), disorders related to adrenal glands (e.g., Addison's Disease, corticosteroid deficiency, and Cushing's Syndrome), kidney cancer (e.g., hypernephroma, transitional cell cancer, and Wilm's tumor), diabetic nephropathy, interstitial nephritis, polycystic kidney disease, glomerulonephritis (e.g., IgM mesangial proliferative glomerulonephritis and glomerulonephritis caused by autoimmune disorders; such as Goodpasture's syndrome), and nephrocalcinosis.

[1297] The recitation of “Digestive” in the “Preferred Indication” column indicates that the corresponding nucleic acid and protein, or antibody against the same, of the invention (or fragment or variant thereof), may be used for example, to diagnose, treat, prevent, and/or ameliorate diseases and/or disorders relating to neoplastic diseases (e.g., as described below under “Hyperproliferative Disorders”) and diseases or disorders of the gastrointestinal system (e.g., as described below under “Gastrointestinal Disorders”.

[1298] In specific embodiments, a protein, nucleic acid, or antibody of the invention (or fragment or variant thereof) having a “Digestive” recitation in the “Preferred Indication” column of Table 1D, may be used for example, to diagnose, treat, prevent, and/or ameliorate a disease or disorder selected from the group consisting of: ulcerative colitis, appendicitis, Crohn's disease, hepatitis, hepatic encephalopathy, portal hypertension, cholelithiasis, cancer of the digestive system (e.g., biliary tract cancer, stomach cancer, colon cancer, gastric cancer, pancreatic cancer, cancer of the bile duct, tumors of the colon (e.g., polyps or cancers), and cirrhosis), pancreatitis, ulcerative disease, pyloric stenosis, gastroenteritis, gastritis, gastric atropy, benign tumors of the duodenum, distension, irritable bowel syndrome, malabsorption, congenital disorders of the small intestine, bacterial and parasitic infection, megacolon, Hirschsprung's disease, aganglionic megacolon, acquired megacolon, colitis, anorectal disorders (e.g., anal fistulas, hemorrhoids), congenital disorders of the liver (e.g., Wilson's disease, hemochromatosis, cystic fibrosis, biliary atresia, and alpha1-antitrypsin deficiency), portal hypertension, cholelithiasis, and jaundice.

[1299] The recitation of “Connective/Epithelial” in the “Preferred Indication” column indicates that the corresponding nucleic acid and protein, or antibody against the same, of the invention (or fragment or variant thereof), may be used for example, to diagnose, treat, prevent, and/or ameliorate diseases and/or disorders relating to neoplastic diseases (e.g., as described below under “Hyperproliferative Disorders”), cellular and genetic abnormalities (e.g., as described below under “Diseases at the Cellular Level”), angiogenesis (e.g., as described below under “Anti-Angiogenesis Activity”), and or to promote or inhibit regeneration (e.g., as described below under “Regeneration”), and wound healing (e.g., as described below under “Wound Healing and Epithelial Cell Proliferation”).

[1300] In specific embodiments, a protein, nucleic acid, or antibody of the invention (or fragment or variant thereof) having a “Connective/Epithelial” recitation in the “Preferred Indication” column of Table 1D, may be used for example, to diagnose, treat, prevent, and/or ameliorate a disease or disorder selected from the group consisting of: connective tissue metaplasia, mixed connective tissue disease, focal epithelial hyperplasia, epithelial metaplasia, mucoepithelial dysplasia, graft v. host disease, polymyositis, cystic hyperplasia, cerebral dysplasia, tissue hypertrophy, Alzheimer's disease, lymphoproliferative disorder, Waldenstron's macroglobulinemia, Crohn's disease, pernicious anemia, idiopathic Addison's disease, glomerulonephritis, bullous pemphigoid, Sjogren's syndrome, diabetes mellitus, cystic fibrosis, osteoblastoma, osteoclastoma, osteosarcoma, chondrosarcoma, osteoporosis, osteocarthritis, periodontal disease, wound healing, relapsing polychondritis, vasculitis, polyarteritis nodosa, Wegener's granulomatosis, cellulitis, rheumatoid arthritis, psoriatic arthritis, discoid lupus erythematosus, systemic lupus erythematosus, scleroderma, CREST syndrome, Sjogren's syndrome, polymyositis, dermatomyositis, mixed connective tissue disease, relapsing polychondritis, vasculitis, Henoch-Schonlein syndrome, erythema nodosum, polyarteritis nodosa, temporal (giant cell) arteritis, Takayasu's arteritis, Wegener's granulomatosis, Reiter's syndrome, Behcet's syndrome, ankylosing spondylitis, cellulitis, keloids, Ehler Danlos syndrome, Marfan syndrome, pseudoxantoma elasticum, osteogenese imperfecta, chondrodysplasias, epidermolysis bullosa, Alport syndrome, and cutis laxa.

[1301] Table 1E also provides information regarding biological activities and preferred therapeutic uses (i.e. see, “Preferred Indications” column) for polynucleotides and polypeptides of the invention (including antibodies, agonists, and/or antagonists thereof). Table 1E also provides information regarding assays which may be used to test polynucleotides and polypeptides of the invention (including antibodies, agonists, and/or antagonists thereof) for the corresponding biological activities. The first column (“Gene No.”) provides the gene number in the application for each clone identifier. The second column (“cDNA Clone ID”) provides the unique clone identifier for each clone as previously described and indicated in Tables 1A, 1B, and 1D. The third column (“AA SEQ ID NO:Y”) indicates the Sequence Listing SEQ ID Number for polypeptide sequences encoded by the corresponding cDNA clones (also as indicated in Tables 1A, 1B, and 2). The fourth column (“Biological Activity”) indicates a biological activity corresponding to the indicated polypeptides (or polynucleotides encoding said polypeptides). The fifth column (“Exemplary Activity Assay”) further describes the corresponding biological activity and also provides information pertaining to the various types of assays which may be performed to test, demonstrate, or quantify the corresponding biological activity. The sixth column (“Preferred Indications”) describes particular embodiments of the invention as well as indications (e.g. pathologies, diseases, disorders, abnormalities, etc.) for which polynucleotides and polypeptides of the invention (including antibodies, agonists, and/or antagonists thereof) may be used in detecting, diagnosing, preventing, and/or treating.

[1302] The present invention is further directed to antibody-based therapies which involve administering antibodies of the invention to an animal, preferably a mammal, and most preferably a human, patient for treating one or more of the disclosed diseases, disorders, or conditions. Therapeutic compounds of the invention include, but are not limited to, antibodies of the invention (including fragments, analogs and derivatives thereof as described herein) and nucleic acids encoding antibodies of the invention (including fragments, analogs and derivatives thereof and anti-idiotypic antibodies as described herein). The antibodies of the invention can be used to treat, inhibit or prevent diseases, disorders or conditions associated with aberrant expression and/or activity of a polypeptide of the invention, including, but not limited to, any one or more of the diseases, disorders, or conditions described herein. The treatment and/or prevention of diseases, disorders, or conditions associated with aberrant expression and/or activity of a polypeptide of the invention includes, but is not limited to, alleviating symptoms associated with those diseases, disorders or conditions. Antibodies of the invention may be provided in pharmaceutically acceptable compositions as known in the art or as described herein.

[1303] In a specific and preferred embodiment, the present invention is directed to antibody-based therapies which involve administering antibodies of the invention to an animal, preferably a mammal, and most preferably a human, patient for treating one or more diseases, disorders, or conditions, including but not limited to: neural disorders, immune system disorders, muscular disorders, reproductive disorders, gastrointestinal disorders, pulmonary disorders, cardiovascular disorders, renal disorders, proliferative disorders, and/or cancerous diseases and conditions, and/or as described elsewhere herein. Therapeutic compounds of the invention include, but are not limited to, antibodies of the invention (e.g., antibodies directed to the full length protein expressed on the cell surface of a mammalian cell; antibodies directed to an epitope of a polypeptide of the invention (such as, for example, a predicted linear epitope shown in column 7 of Table 1B; or a conformational epitope, including fragments, analogs and derivatives thereof as described herein) and nucleic acids encoding antibodies of the invention (including fragments, analogs and derivatives thereof and anti-idiotypic antibodies as described herein). The antibodies of the invention can be used to treat, inhibit or prevent diseases, disorders or conditions associated with aberrant expression and/or activity of a polypeptide of the invention, including, but not limited to, any one or more of the diseases, disorders, or conditions described herein. The treatment and/or prevention of diseases, disorders, or conditions associated with aberrant expression and/or activity of a polypeptide of the invention includes, but is not limited to, alleviating symptoms associated with those diseases, disorders or conditions. Antibodies of the invention may be provided in pharmaceutically acceptable compositions as known in the art or as described herein.

[1304] A summary of the ways in which the antibodies of the present invention may be used therapeutically includes binding polynucleotides or polypeptides of the present invention locally or systemically in the body or by direct cytotoxicity of the antibody, e.g. as mediated by complement (CDC) or by effector cells (ADCC). Some of these approaches are described in more detail below. Armed with the teachings provided herein, one of ordinary skill in the art will know how to use the antibodies of the present invention for diagnostic, monitoring or therapeutic purposes without undue experimentation.

[1305] The antibodies of this invention may be advantageously utilized in combination with other monoclonal or chimeric antibodies, or with lymphokines or hematopoietic growth factors (such as, e.g., IL-2, IL-3 and IL-7), for example, which serve to increase the number or activity of effector cells which interact with the antibodies.

[1306] The antibodies of the invention may be administered alone or in combination with other types of treatments (e.g., radiation therapy, chemotherapy, hormonal therapy, immunotherapy and anti-tumor agents). Generally, administration of products of a species origin or species reactivity (in the case of antibodies) that is the same species as that of the patient is preferred. Thus, in a preferred embodiment, human antibodies, fragments derivatives, analogs, or nucleic acids, are administered to a human patient for therapy or prophylaxis.

[1307] It is preferred to use high affinity and/or potent in vivo inhibiting and/or neutralizing antibodies against polypeptides or polynucleotides of the present invention, fragments or regions thereof, for both immunoassays directed to and therapy of disorders related to polynucleotides or polypeptides, including fragments thereof, of the present invention. Such antibodies, fragments, or regions, will preferably have an affinity for polynucleotides or polypeptides of the invention, including fragments thereof. Preferred binding affinities include those with a dissociation constant or Kd less than 5×10⁻² M, 10⁻² M, 5×10⁻³ M, 10⁻³ M, 5×10⁻⁴ M, 10⁻⁴ M, 5×10⁻⁵ M, 10⁻⁵ M, 5×10⁻⁶ M, 10⁻⁶ M, 5×10⁻⁷ M, 10⁻⁷ M, 5×10⁻⁸ M, 10⁻⁸ M, 5×10⁻⁹ M, 10⁻⁹ M, 5×10⁻¹⁰ M, 10⁻¹⁰ M, 5×10⁻¹¹ M, 10⁻¹¹ M, 5×10⁻¹² M, 10⁻¹² M, 5×10⁻¹³ M, 10⁻¹³ M, 5×10⁻¹⁴ M, 10⁻¹⁴ M, 5×10⁻¹⁵ M, and 10⁻¹⁵ M.

Gene Therapy

[1308] In a specific embodiment, nucleic acids comprising sequences encoding antibodies or functional derivatives thereof, are administered to treat, inhibit or prevent a disease or disorder associated with aberrant expression and/or activity of a polypeptide of the invention, by way of gene therapy. Gene therapy refers to therapy performed by the administration to a subject of an expressed or expressible nucleic acid. In this embodiment of the invention, the nucleic acids produce their encoded protein that mediates a therapeutic effect.

[1309] Any of the methods for gene therapy available in the art can be used according to the present invention. Exemplary methods are described below.

[1310] For general reviews of the methods of gene therapy, see Goldspiel et al., Clinical Pharmacy 12:488-505 (1993); Wu and Wu, Biotherapy 3:87-95 (1991); Tolstoshev, Ann. Rev. Pharmacol. Toxicol. 32:573-596 (1993); Mulligan, Science 260:926-932 (1993); and Morgan and Anderson, Ann. Rev. Biochem. 62:191-217 (1993); May, TIBTECH 11(5):155-215 (1993). Methods commonly known in the art of recombinant DNA technology which can be used are described in Ausubel et al. (eds.), Current Protocols in Molecular Biology, John Wiley & Sons, NY (1993); and Kriegler, Gene Transfer and Expression, A Laboratory Manual, Stockton Press, NY (1990).

[1311] In a preferred embodiment, the compound comprises nucleic acid sequences encoding an antibody, said nucleic acid sequences being part of expression vectors that express the antibody or fragments or chimeric proteins or heavy or light chains thereof in a suitable host. In particular, such nucleic acid sequences have promoters operably linked to the antibody coding region, said promoter being inducible or constitutive, and, optionally, tissue-specific. In another particular embodiment, nucleic acid molecules are used in which the antibody coding sequences and any other desired sequences are flanked by regions that promote homologous recombination at a desired site in the genome, thus providing for intrachromosomal expression of the antibody encoding nucleic acids (Koller and Smithies, Proc. Natl. Acad. Sci. USA 86:8932-8935 (1989); Zijlstra et al., Nature 342:435-438 (1989). In specific embodiments, the expressed antibody molecule is a single chain antibody; alternatively, the nucleic acid sequences include sequences encoding both the heavy and light chains, or fragments thereof, of the antibody.

[1312] Delivery of the nucleic acids into a patient may be either direct, in which case the patient is directly exposed to the nucleic acid or nucleic acid-carrying vectors, or indirect, in which case, cells are first transformed with the nucleic acids in vitro, then transplanted into the patient. These two approaches are known, respectively, as in vivo or ex vivo gene therapy.

[1313] In a specific embodiment, the nucleic acid sequences are directly administered in vivo, where it is expressed to produce the encoded product. This can be accomplished by any of numerous methods known in the art, e.g., by constructing them as part of an appropriate nucleic acid expression vector and administering it so that they become intracellular, e.g., by infection using defective or attenuated retrovirals or other viral vectors (see U.S. Pat. No. 4,980,286), or by direct injection of naked DNA, or by use of microparticle bombardment (e.g., a gene gun; Biolistic, Dupont), or coating with lipids or cell-surface receptors or transfecting agents, encapsulation in liposomes, microparticles, or microcapsules, or by administering them in linkage to a peptide which is known to enter the nucleus, by administering it in linkage to a ligand subject to receptor-mediated endocytosis (see, e.g., Wu and Wu, J. Biol. Chem. 262:4429-4432 (1987)) (which can be used to target cell types specifically expressing the receptors), etc. In another embodiment, nucleic acid-ligand complexes can be formed in which the ligand comprises a fusogenic viral peptide to disrupt endosomes, allowing the nucleic acid to avoid lysosomal degradation. In yet another embodiment, the nucleic acid can be targeted in vivo for cell specific uptake and expression, by targeting a specific receptor (see, e.g., PCT Publications WO 92/06180; WO 92/22635; WO92/20316; WO93/14188, WO 93/20221). Alternatively, the nucleic acid can be introduced intracellularly and incorporated within host cell DNA for expression, by homologous recombination (Koller and Smithies, Proc. Natl. Acad. Sci. USA 86:8932-8935 (1989); Zijlstra et al., Nature 342:435-438 (1989)).

[1314] In a specific embodiment, viral vectors that contains nucleic acid sequences encoding an antibody of the invention are used. For example, a retroviral vector can be used (see Miller et al., Meth. Enzymol. 217:581-599 (1993)). These retroviral vectors contain the components necessary for the correct packaging of the viral genome and integration into the host cell DNA. The nucleic acid sequences encoding the antibody to be used in gene therapy are cloned into one or more vectors, which facilitates delivery of the gene into a patient. More detail about retroviral vectors can be found in Boesen et al., Biotherapy 6:291-302 (1994), which describes the use of a retroviral vector to deliver the mdr1 gene to hematopoietic stem cells in order to make the stem cells more resistant to chemotherapy. Other references illustrating the use of retroviral vectors in gene therapy are: Clowes et al., J. Clin. Invest. 93:644-651 (1994); Kiem et al., Blood 83:1467-1473 (1994); Salmons and Gunzberg, Human Gene Therapy 4:129-141 (1993); and Grossman and Wilson, Curr. Opin. in Genetics and Devel. 3:110-114 (1993).

[1315] Adenoviruses are other viral vectors that can be used in gene therapy. Adenoviruses are especially attractive vehicles for delivering genes to respiratory epithelia. Adenoviruses naturally infect respiratory epithelia where they cause a mild disease. Other targets for adenovirus-based delivery systems are liver, the central nervous system, endothelial cells, and muscle. Adenoviruses have the advantage of being capable of infecting non-dividing cells. Kozarsky and Wilson, Current Opinion in Genetics and Development 3:499-503 (1993) present a review of adenovirus-based gene therapy. Bout et al., Human Gene Therapy 5:3-10 (1994) demonstrated the use of adenovirus vectors to transfer genes to the respiratory epithelia of rhesus monkeys. Other instances of the use of adenoviruses in gene therapy can be found in Rosenfeld et al., Science 252:431-434 (1991); Rosenfeld et al., Cell 68:143-155 (1992); Mastrangeli et al., J. Clin. Invest. 91:225-234 (1993); PCT Publication WO94/12649; and Wang, et al., Gene Therapy 2:775-783 (1995). In a preferred embodiment, adenovirus vectors are used.

[1316] Adeno-associated virus (AAV) has also been proposed for use in gene therapy (Walsh et al., Proc. Soc. Exp. Biol. Med. 204:289-300 (1993); U.S. Pat. No. 5,436,146).

[1317] Another approach to gene therapy involves transferring a gene to cells in tissue culture by such methods as electroporation, lipofection, calcium phosphate mediated transfection, or viral infection. Usually, the method of transfer includes the transfer of a selectable marker to the cells. The cells are then placed under selection to isolate those cells that have taken up and are expressing the transferred gene. Those cells are then delivered to a patient.

[1318] In this embodiment, the nucleic acid is introduced into a cell prior to administration in vivo of the resulting recombinant cell. Such introduction can be carried out by any method known in the art, including but not limited to transfection, electroporation, microinjection, infection with a viral or bacteriophage vector containing the nucleic acid sequences, cell fusion, chromosome-mediated gene transfer, microcell-mediated gene transfer, spheroplast fusion, etc. Numerous techniques are known in the art for the introduction of foreign genes into cells (see, e.g., Loeffler and Behr, Meth. Enzymol. 217:599-618 (1993); Cohen et al., Meth. Enzymol. 217:618-644 (1993); Cline, Pharmac. Ther. 29:69-92m (1985) and may be used in accordance with the present invention, provided that the necessary developmental and physiological functions of the recipient cells are not disrupted. The technique should provide for the stable transfer of the nucleic acid to the cell, so that the nucleic acid is expressible by the cell and preferably heritable and expressible by its cell progeny.

[1319] The resulting recombinant cells can be delivered to a patient by various methods known in the art. Recombinant blood cells (e.g., hematopoietic stem or progenitor cells) are preferably administered intravenously. The amount of cells envisioned for use depends on the desired effect, patient state, etc., and can be determined by one skilled in the art.

[1320] Cells into which a nucleic acid can be introduced for purposes of gene therapy encompass any desired, available cell type, and include but are not limited to epithelial cells, endothelial cells, keratinocytes, fibroblasts, muscle cells, hepatocytes; blood cells such as T lymphocytes, B lymphocytes, monocytes, macrophages, neutrophils, eosinophils, megakaryocytes, granulocytes; various stem or progenitor cells, in particular hematopoietic stem or progenitor cells, e.g., as obtained from bone marrow, umbilical cord blood, peripheral blood, fetal liver, etc.

[1321] In a preferred embodiment, the cell used for gene therapy is autologous to the patient.

[1322] In an embodiment in which recombinant cells are used in gene therapy, nucleic acid sequences encoding an antibody are introduced into the cells such that they are expressible by the cells or their progeny, and the recombinant cells are then administered in vivo for therapeutic effect. In a specific embodiment, stem or progenitor cells are used. Any stem and/or progenitor cells which can be isolated and maintained in vitro can potentially be used in accordance with this embodiment of the present invention (see e.g. PCT Publication WO 94/08598; Stemple and Anderson, Cell 71:973-985 (1992); Rheinwald, Meth. Cell Bio. 21A:229 (1980); and Pittelkow and Scott, Mayo Clinic Proc. 61:771 (1986)).

[1323] In a specific embodiment, the nucleic acid to be introduced for purposes of gene therapy comprises an inducible promoter operably linked to the coding region, such that expression of the nucleic acid is controllable by the presence or absence of an appropriate inducer of transcription.

Demonstration of Therapeutic or Prophylactic Activity

[1324] The compounds or pharmaceutical compositions of the invention are preferably tested in vitro, and then in vivo for the desired therapeutic or prophylactic activity, prior to use in humans. For example, in vitro assays to demonstrate the therapeutic or prophylactic utility of a compound or pharmaceutical composition include, the effect of a compound on a cell line or a patient tissue sample. The effect of the compound or composition on the cell line and/or tissue sample can be determined utilizing techniques known to those of skill in the art including, but not limited to, rosette formation assays and cell lysis assays. In accordance with the invention, in vitro assays which can be used to determine whether administration of a specific compound is indicated, include in vitro cell culture assays in which a patient tissue sample is grown in culture, and exposed to or otherwise administered a compound, and the effect of such compound upon the tissue sample is observed.

Therapeutic/Prophylactic Administration and Composition

[1325] The invention provides methods of treatment, inhibition and prophylaxis by administration to a subject of an effective amount of a compound or pharmaceutical composition of the invention, preferably a polypeptide or antibody of the invention. In a preferred embodiment, the compound is substantially purified (e.g., substantially free from substances that limit its effect or produce undesired side-effects). The subject is preferably an animal, including but not limited to animals such as cows, pigs, horses, chickens, cats, dogs, etc., and is preferably a mammal, and most preferably human.

[1326] Formulations and methods of administration that can be employed when the compound comprises a nucleic acid or an immunoglobulin are described above; additional appropriate formulations and routes of administration can be selected from among those described herein below.

[1327] Various delivery systems are known and can be used to administer a compound of the invention, e.g., encapsulation in liposomes, microparticles, microcapsules, recombinant cells capable of expressing the compound, receptor-mediated endocytosis (see, e.g., Wu and Wu, J. Biol. Chem. 262:4429-4432 (1987)), construction of a nucleic acid as part of a retroviral or other vector, etc. Methods of introduction include but are not limited to intradermal, intramuscular, intraperitoneal, intravenous, subcutaneous, intranasal, epidural, and oral routes. The compounds or compositions may be administered by any convenient route, for example by infusion or bolus injection, by absorption through epithelial or mucocutaneous linings (e.g., oral mucosa, rectal and intestinal mucosa, etc.) and may be administered together with other biologically active agents. Administration can be systemic or local. In addition, it may be desirable to introduce the pharmaceutical compounds or compositions of the invention into the central nervous system by any suitable route, including intraventricular and intrathecal injection; intraventricular injection may be facilitated by an intraventricular catheter, for example, attached to a reservoir, such as an Ommaya reservoir. Pulmonary administration can also be employed, e.g., by use of an inhaler or nebulizer, and formulation with an aerosolizing agent.

[1328] In a specific embodiment, it may be desirable to administer the pharmaceutical compounds or compositions of the invention locally to the area in need of treatment; this may be achieved by, for example, and not by way of limitation, local infusion during surgery, topical application, e.g., in conjunction with a wound dressing after surgery, by injection, by means of a catheter, by means of a suppository, or by means of an implant, said implant being of a porous, non-porous, or gelatinous material, including membranes, such as sialastic membranes, or fibers. Preferably, when administering a protein, including an antibody, of the invention, care must be taken to use materials to which the protein does not absorb.

[1329] In another embodiment, the compound or composition can be delivered in a vesicle, in particular a liposome (see Langer, Science 249:1527-1533 (1990); Treat et al., in Liposomes in the Therapy of Infectious Disease and Cancer, Lopez-Berestein and Fidler (eds.), Liss, New York, pp. 353-365 (1989); Lopez-Berestein, ibid., pp. 317-327; see generally ibid.)

[1330] In yet another embodiment, the compound or composition can be delivered in a controlled release system. In one embodiment, a pump may be used (see Langer, supra; Sefton, CRC Crit. Ref. Biomed. Eng. 14:201 (1987); Buchwald et al., Surgery 88:507 (1980); Saudek et al., N. Engl. J. Med. 321:574 (1989)). In another embodiment, polymeric materials can be used (see Medical Applications of Controlled Release, Langer and Wise (eds.), CRC Pres., Boca Raton, Fla. (1974); Controlled Drug Bioavailability, Drug Product Design and Performance, Smolen and Ball (eds.), Wiley, New York (1984); Ranger and Peppas, J., Macromol. Sci. Rev. Macromol. Chem. 23:61 (1983); see also Levy et al., Science 228:190 (1985); During et al., Ann. Neurol. 25:351 (1989); Howard et al., J. Neurosurg. 71:105 (1989)). In yet another embodiment, a controlled release system can be placed in proximity of the therapeutic target, e.g., the brain, thus requiring only a fraction of the systemic dose (see, e.g., Goodson, in Medical Applications of Controlled Release, supra, vol. 2, pp. 115-138 (1984)).

[1331] Other controlled release systems are discussed in the review by Langer (Science 249:1527-1533 (1990)).

[1332] In a specific embodiment where the compound of the invention is a nucleic acid encoding a protein, the nucleic acid can be administered in vivo to promote expression of its encoded protein, by constructing it as part of an appropriate nucleic acid expression vector and administering it so that it becomes intracellular, e.g., by use of a retroviral vector (see U.S. Pat. No. 4,980,286), or by direct injection, or by use of microparticle bombardment (e.g., a gene gun; Biolistic, Dupont), or coating with lipids or cell-surface receptors or transfecting agents, or by administering it in linkage to a homeobox-like peptide which is known to enter the nucleus (see e.g., Joliot et al., Proc. Natl. Acad. Sci. USA 88:1864-1868 (1991)), etc. Alternatively, a nucleic acid can be introduced intracellularly and incorporated within host cell DNA for expression, by homologous recombination.

[1333] The present invention also provides pharmaceutical compositions. Such compositions comprise a therapeutically effective amount of a compound, and a pharmaceutically acceptable carrier. In a specific embodiment, the term “pharmaceutically acceptable” means approved by a regulatory agency of the Federal or a state government or listed in the U.S. Pharmacopeia or other generally recognized pharmacopeia for use in animals, and more particularly in humans. The term “carrier” refers to a diluent, adjuvant, excipient, or vehicle with which the therapeutic is administered. Such pharmaceutical carriers can be sterile liquids, such as water and oils, including those of petroleum, animal, vegetable or synthetic origin, such as peanut oil, soybean oil, mineral oil, sesame oil and the like. Water is a preferred carrier when the pharmaceutical composition is administered intravenously. Saline solutions and aqueous dextrose and glycerol solutions can also be employed as liquid carriers, particularly for injectable solutions. Suitable pharmaceutical excipients include starch, glucose, lactose, sucrose, gelatin, malt, rice, flour, chalk, silica gel, sodium stearate, glycerol monostearate, talc, sodium chloride, dried skim milk, glycerol, propylene, glycol, water, ethanol and the like. The composition, if desired, can also contain minor amounts of wetting or emulsifying agents, or pH buffering agents. These compositions can take the form of solutions, suspensions, emulsion, tablets, pills, capsules, powders, sustained-release formulations and the like. The composition can be formulated as a suppository, with traditional binders and carriers such as triglycerides. Oral formulation can include standard carriers such as pharmaceutical grades of mannitol, lactose, starch, magnesium stearate, sodium saccharine, cellulose, magnesium carbonate, etc. Examples of suitable pharmaceutical carriers are described in “Remington's Pharmaceutical Sciences” by E. W. Martin. Such compositions will contain a therapeutically effective amount of the compound, preferably in purified form, together with a suitable amount of carrier so as to provide the form for proper administration to the patient. The formulation should suit the mode of administration.

[1334] In a preferred embodiment, the composition is formulated in accordance with routine procedures as a pharmaceutical composition adapted for intravenous administration to human beings. Typically, compositions for intravenous administration are solutions in sterile isotonic aqueous buffer. Where necessary, the composition may also include a solubilizing agent and a local anesthetic such as lignocaine to ease pain at the site of the injection. Generally, the ingredients are supplied either separately or mixed together in unit dosage form, for example, as a dry lyophilized powder or water free concentrate in a hermetically sealed container such as an ampoule or sachette indicating the quantity of active agent. Where the composition is to be administered by infusion, it can be dispensed with an infusion bottle containing sterile pharmaceutical grade water or saline. Where the composition is administered by injection, an ampoule of sterile water for injection or saline can be provided so that the ingredients may be mixed prior to administration.

[1335] The compounds of the invention can be formulated as neutral or salt forms. Pharmaceutically acceptable salts include those formed with anions such as those derived from hydrochloric, phosphoric, acetic, oxalic, tartaric acids, etc., and those formed with cations such as those derived from sodium, potassium, ammonium, calcium, ferric hydroxides, isopropylamine, triethylamine, 2-ethylamino ethanol, histidine, procaine, etc.

[1336] The amount of the compound of the invention which will be effective in the treatment, inhibition and prevention of a disease or disorder associated with aberrant expression and/or activity of a polypeptide of the invention can be determined by standard clinical techniques. In addition, in vitro assays may optionally be employed to help identify optimal dosage ranges. The precise dose to be employed in the formulation will also depend on the route of administration, and the seriousness of the disease or disorder, and should be decided according to the judgment of the practitioner and each patient's circumstances. Effective doses may be extrapolated from dose-response curves derived from in vitro or animal model test systems.

[1337] For antibodies, the dosage administered to a patient is typically 0.1 mg/kg to 100 mg/kg of the patient's body weight. Preferably, the dosage administered to a patient is between 0.1 mg/kg and 20 mg/kg of the patient's body weight, more preferably 1 mg/kg to 10 mg/kg of the patient's body weight. Generally, human antibodies have a longer half-life within the human body than antibodies from other species due to the immune response to the foreign polypeptides. Thus, lower dosages of human antibodies and less frequent administration is often possible. Further, the dosage and frequency of administration of antibodies of the invention may be reduced by enhancing uptake and tissue penetration (e.g., into the brain) of the antibodies by modifications such as, for example, lipidation.

[1338] The invention also provides a pharmaceutical pack or kit comprising one or more containers filled with one or more of the ingredients of the pharmaceutical compositions of the invention. Optionally associated with such container(s) can be a notice in the form prescribed by a governmental agency regulating the manufacture, use or sale of pharmaceuticals or biological products, which notice reflects approval by the agency of manufacture, use or sale for human administration.

Diagnosis and Imaging

[1339] Labeled antibodies, and derivatives and analogs thereof, which specifically bind to a polypeptide of interest can be used for diagnostic purposes to detect, diagnose, or monitor diseases, disorders, and/or conditions associated with the aberrant expression and/or activity of a polypeptide of the invention. The invention provides for the detection of aberrant expression of a polypeptide of interest, comprising (a) assaying the expression of the polypeptide of interest in cells or body fluid of an individual using one or more antibodies specific to the polypeptide interest and (b) comparing the level of gene expression with a standard gene expression level, whereby an increase or decrease in the assayed polypeptide gene expression level compared to the standard expression level is indicative of aberrant expression.

[1340] The invention provides a diagnostic assay for diagnosing a disorder, comprising (a) assaying the expression of the polypeptide of interest in cells or body fluid of an individual using one or more antibodies specific to the polypeptide interest and (b) comparing the level of gene expression with a standard gene expression level, whereby an increase or decrease in the assayed polypeptide gene expression level compared to the standard expression level is indicative of a particular disorder. With respect to cancer, the presence of a relatively high amount of transcript in biopsied tissue from an individual may indicate a predisposition for the development of the disease, or may provide a means for detecting the disease prior to the appearance of actual clinical symptoms. A more definitive diagnosis of this type may allow health professionals to employ preventative measures or aggressive treatment earlier thereby preventing the development or further progression of the cancer.

[1341] Antibodies of the invention can be used to assay protein levels in a biological sample using classical immunohistological methods known to those of skill in the art (e.g., see Jalkanen et al., J. Cell. Biol. 101:976-985 (1985); Jalkanen et al., J. Cell. Biol. 105:3087-3096 (1987)). Other antibody-based methods useful for detecting protein gene expression include immunoassays, such as the enzyme linked immunosorbent assay (ELISA) and the radioimmunoassay (RIA). Suitable antibody assay labels are known in the art and include enzyme labels, such as, glucose oxidase; radioisotopes, such as iodine (125I, 121I), carbon (14C), sulfur (35S), tritium (3H), indium (112In), and technetium (99Tc); luminescent labels, such as luminol; and fluorescent labels, such as fluorescein and rhodamine, and biotin.

[1342] One facet of the invention is the detection and diagnosis of a disease or disorder associated with aberrant expression of a polypeptide of interest in an animal, preferably a mammal and most preferably a human. In one embodiment, diagnosis comprises: a) administering (for example, parenterally, subcutaneously, or intraperitoneally) to a subject an effective amount of a labeled molecule which specifically binds to the polypeptide of interest; b) waiting for a time interval following the administering for permitting the labeled molecule to preferentially concentrate at sites in the subject where the polypeptide is expressed (and for unbound labeled molecule to be cleared to background level); c) determining background level; and d) detecting the labeled molecule in the subject, such that detection of labeled molecule above the background level indicates that the subject has a particular disease or disorder associated with aberrant expression of the polypeptide of interest. Background level can be determined by various methods including, comparing the amount of labeled molecule detected to a standard value previously determined for a particular system.

[1343] It will be understood in the art that the size of the subject and the imaging system used will determine the quantity of imaging moiety needed to produce diagnostic images. In the case of a radioisotope moiety, for a human subject, the quantity of radioactivity injected will normally range from about 5 to 20 millicuries of 99mTc. The labeled antibody or antibody fragment will then preferentially accumulate at the location of cells which contain the specific protein. In vivo tumor imaging is described in S. W. Burchiel et al., “Immunopharmacokinetics of Radiolabeled Antibodies and Their Fragments.” (Chapter 13 in Tumor Imaging: The Radiochemical Detection of Cancer, S. W. Burchiel and B. A. Rhodes, eds., Masson Publishing Inc. (1982)).

[1344] Depending on several variables, including the type of label used and the mode of administration, the time interval following the administration for permitting the labeled molecule to preferentially concentrate at sites in the subject and for unbound labeled molecule to be cleared to background level is 6 to 48 hours or 6 to 24 hours or 6 to 12 hours. In another embodiment the time interval following administration is 5 to 20 days or 5 to 10 days.

[1345] In an embodiment, monitoring of the disease or disorder is carried out by repeating the method for diagnosing the disease or disease, for example, one month after initial diagnosis, six months after initial diagnosis, one year after initial diagnosis, etc.

[1346] Presence of the labeled molecule can be detected in the patient using methods known in the art for in vivo scanning. These methods depend upon the type of label used. Skilled artisans will be able to determine the appropriate method for detecting a particular label. Methods and devices that may be used in the diagnostic methods of the invention include, but are not limited to, computed tomography (CT), whole body scan such as position emission tomography (PET), magnetic resonance imaging (MRI), and sonography.

[1347] In a specific embodiment, the molecule is labeled with a radioisotope and is detected in the patient using a radiation responsive surgical instrument (Thurston et al., U.S. Pat. No. 5,441,050). In another embodiment, the molecule is labeled with a fluorescent compound and is detected in the patient using a fluorescence responsive scanning instrument. In another embodiment, the molecule is labeled with a positron emitting metal and is detected in the patent using positron emission-tomography. In yet another embodiment, the molecule is labeled with a paramagnetic label and is detected in a patient using magnetic resonance imaging (MRI).

Kits

[1348] The present invention provides kits that can be used in the above methods. In one embodiment, a kit comprises an antibody of the invention, preferably a purified antibody, in one or more containers. In a specific embodiment, the kits of the present invention contain a substantially isolated polypeptide comprising an epitope which is specifically immunoreactive with an antibody included in the kit. Preferably, the kits of the present invention further comprise a control antibody which does not react with the polypeptide of interest. In another specific embodiment, the kits of the present invention contain a means for detecting the binding of an antibody to a polypeptide of interest (e.g., the antibody may be conjugated to a detectable substrate such as a fluorescent compound, an enzymatic substrate, a radioactive compound or a luminescent compound, or a second antibody which recognizes the first antibody may be conjugated to a detectable substrate).

[1349] In another specific embodiment of the present invention, the kit is a diagnostic kit for use in screening serum containing antibodies specific against proliferative and/or cancerous polynucleotides and polypeptides. Such a kit may include a control antibody that does not react with the polypeptide of interest. Such a kit may include a substantially isolated polypeptide antigen comprising an epitope which is specifically immunoreactive with at least one anti-polypeptide antigen antibody. Further, such a kit includes means for detecting the binding of said antibody to the antigen (e.g., the antibody may be conjugated to a fluorescent compound such as fluorescein or rhodamine which can be detected by flow cytometry). In specific embodiments, the kit may include a recombinantly produced or chemically synthesized polypeptide antigen. The polypeptide antigen of the kit may also be attached to a solid support.

[1350] In a more specific embodiment the detecting means of the above-described kit includes a solid support to which said polypeptide antigen is attached. Such a kit may also include a non-attached reporter-labeled anti-human antibody. In this embodiment, binding of the antibody to the polypeptide antigen can be detected by binding of the said reporter-labeled antibody.

[1351] In an additional embodiment, the invention includes a diagnostic kit for use in screening serum containing antigens of the polypeptide of the invention. The diagnostic kit includes a substantially isolated antibody specifically immunoreactive with polypeptide or polynucleotide antigens, and means for detecting the binding of the polynucleotide or polypeptide antigen to the antibody. In one embodiment, the antibody is attached to a solid support. In a specific embodiment, the antibody may be a monoclonal antibody. The detecting means of the kit may include a second, labeled monoclonal antibody. Alternatively, or in addition, the detecting means may include a labeled, competing antigen.

[1352] In one diagnostic configuration, test serum is reacted with a solid phase reagent having a surface-bound antigen obtained by the methods of the present invention. After binding with specific antigen antibody to the reagent and removing unbound serum components by washing, the reagent is reacted with reporter-labeled anti-human antibody to bind reporter to the reagent in proportion to the amount of bound anti-antigen antibody on the solid support. The reagent is again washed to remove unbound labeled antibody, and the amount of reporter associated with the reagent is determined. Typically, the reporter is an enzyme which is detected by incubating the solid phase in the presence of a suitable fluorometric, luminescent or calorimetric substrate (Sigma, St. Louis, Mo.).

[1353] The solid surface reagent in the above assay is prepared by known techniques for attaching protein material to solid support material, such as polymeric beads, dip sticks, 96-well plate or filter material. These attachment methods generally include non-specific adsorption of the protein to the support or covalent attachment of the protein, typically through a free amine group, to a chemically reactive group on the solid support, such as an activated carboxyl, hydroxyl, or aldehyde group. Alternatively, streptavidin coated plates can be used in conjunction with biotinylated antigen(s).

[1354] Thus, the invention provides an assay system or kit for carrying out this diagnostic method. The kit generally includes a support with surface-bound recombinant antigens, and a reporter-labeled anti-human antibody for detecting surface-bound anti-antigen antibody.

Uses of the Polynucleotides

[1355] Each of the polynucleotides identified herein can be used in numerous ways as reagents. The following description should be considered exemplary and utilizes known techniques.

[1356] The polynucleotides of the present invention are useful for chromosome identification. There exists an ongoing need to identify new chromosome markers, since few chromosome marking reagents, based on actual sequence data (repeat polymorphisms), are presently available. Each sequence is specifically targeted to and can hybridize with a particular location on an individual human chromosome, thus each polynucleotide of the present invention can routinely be used as a chromosome marker using techniques known in the art. Table 1B, column 9 provides the chromosome location of some of the polynucleotides of the invention.

[1357] Briefly, sequences can be mapped to chromosomes by preparing PCR primers (preferably at least 15 bp (e.g., 15-25 bp) from the sequences shown in SEQ ID NO:X. Primers can optionally be selected using computer analysis so that primers do not span more than one predicted exon in the genomic DNA. These primers are then used for PCR screening of somatic cell hybrids containing individual human chromosomes. Only those hybrids containing the human gene corresponding to SEQ ID NO:X will yield an amplified fragment.

[1358] Similarly, somatic hybrids provide a rapid method of PCR mapping the polynucleotides to particular chromosomes. Three or more clones can be assigned per day using a single thermal cycler. Moreover, sublocalization of the polynucleotides can be achieved with panels of specific chromosome fragments. Other gene mapping strategies that can be used include in situ hybridization, prescreening with labeled flow-sorted chromosomes, preselection by hybridization to construct chromosome specific-cDNA libraries, and computer mapping techniques (See, e.g., Shuler, Trends Biotechnol 16:456-459 (1998) which is hereby incorporated by reference in its entirety).

[1359] Precise chromosomal location of the polynucleotides can also be achieved using fluorescence in situ hybridization (FISH) of a metaphase chromosomal spread. This technique uses polynucleotides as short as 500 or 600 bases; however, polynucleotides 2,000-4,000 bp are preferred. For a review of this technique, see Verma et al., “Human Chromosomes: a Manual of Basic Techniques,” Pergamon Press, New York (1988).

[1360] For chromosome mapping, the polynucleotides can be used individually (to mark a single chromosome or a single site on that chromosome) or in panels (for marking multiple sites and/or multiple chromosomes).

[1361] Thus, the present invention also provides a method for chromosomal localization which involves (a) preparing PCR primers from the polynucleotide sequences in Table 1B and/or Table 2 and SEQ ID NO:X and (b) screening somatic cell hybrids containing individual chromosomes.

[1362] The polynucleotides of the present invention would likewise be useful for radiation hybrid mapping, HAPPY mapping, and long range restriction mapping. For a review of these techniques and others known in the art, see, e.g. Dear, “Genome Mapping: A Practical Approach,” IRL Press at Oxford University Press, London (1997); Aydin, J. Mol. Med. 77:691-694 (1999); Hacia et al., Mol. Psychiatry 3:483-492 (1998); Herrick et al., Chromosome Res. 7:409-423 (1999); Hamilton et al., Methods Cell Biol. 62:265-280 (2000); and/or Ott, J. Hered. 90:68-70 (1999) each of which is hereby incorporated by reference in its entirety.

[1363] Once a polynucleotide has been mapped to a precise chromosomal location, the physical position of the polynucleotide can be used in linkage analysis. Linkage analysis establishes coinheritance between a chromosomal location and presentation of a particular disease. (Disease mapping data are found, for example, in V. McKusick, Mendelian Inheritance in Man (available on line through Johns Hopkins University Welch Medical Library)). Column 10 of Table 1B provides an OMIM reference identification number of diseases associated with the cytologic band disclosed in column 9 of Table 1B, as determined using techniques described herein and by reference to Table 5. Assuming 1 megabase mapping resolution and one gene per 20 kb, a cDNA precisely localized to a chromosomal region associated with the disease could be one of 50-500 potential causative genes.

[1364] Thus, once coinheritance is established, differences in a polynucleotide of the invention and the corresponding gene between affected and unaffected individuals can be examined. First, visible structural alterations in the chromosomes, such as deletions or translocations, are examined in chromosome spreads or by PCR. If no structural alterations exist, the presence of point mutations are ascertained. Mutations observed in some or all affected individuals, but not in normal individuals, indicates that the mutation may cause the disease. However, complete sequencing of the polypeptide and the corresponding gene from several normal individuals is required to distinguish the mutation from a polymorphism. If a new polymorphism is identified, this polymorphic polypeptide can be used for further linkage analysis.

[1365] Furthermore, increased or decreased expression of the gene in affected individuals as compared to unaffected individuals can be assessed using the polynucleotides of the invention. Any of these alterations (altered expression, chromosomal rearrangement, or mutation) can be used as a diagnostic or prognostic marker. Diagnostic and prognostic methods, kits and reagents encompassed by the present invention are briefly described below and more thoroughly elsewhere herein (see e.g., the sections labeled “Antibodies”, “Diagnostic Assays”, and “Methods for Detecting Diseases”).

[1366] Thus, the invention also provides a diagnostic method useful during diagnosis of a disorder, involving measuring the expression level of polynucleotides of the present invention in cells or body fluid from an individual and comparing the measured gene expression level with a standard level of polynucleotide expression level, whereby an increase or decrease in the gene expression level compared to the standard is indicative of a disorder. Additional non-limiting examples of diagnostic methods encompassed by the present invention are more thoroughly described elsewhere herein (see, e.g., Example 11).

[1367] In still another embodiment, the invention includes a kit for analyzing samples for the presence of proliferative and/or cancerous polynucleotides derived from a test subject. In a general embodiment, the kit includes at least one polynucleotide probe containing a nucleotide sequence that will specifically hybridize with a polynucleotide of the invention and a suitable container. In a specific embodiment, the kit includes two polynucleotide probes defining an internal region of the polynucleotide of the invention, where each probe has one strand containing a 31′mer-end internal to the region. In a further embodiment, the probes may be useful as primers for polymerase chain reaction amplification.

[1368] Where a diagnosis of a related disorder, including, for example, diagnosis of a tumor, has already been made according to conventional methods, the present invention is useful as a prognostic indicator, whereby patients exhibiting enhanced or depressed polynucleotide of the invention expression will experience a worse clinical outcome relative to patients expressing the gene at a level nearer the standard level.

[1369] By “measuring the expression level of polynucleotides of the invention” is intended qualitatively or quantitatively measuring or estimating the level of the polypeptide of the invention or the level of the mRNA encoding the polypeptide of the invention in a first biological sample either directly (e.g., by determining or estimating absolute protein level or mRNA level) or relatively (e.g., by comparing to the polypeptide level or mRNA level in a second biological sample). Preferably, the polypeptide level or mRNA level in the first biological sample is measured or estimated and compared to a standard polypeptide level or mRNA level, the standard being taken from a second biological sample obtained from an individual not having the related disorder or being determined by averaging levels from a population of individuals not having a related disorder. As will be appreciated in the art, once a standard polypeptide level or mRNA level is known, it can be used repeatedly as a standard for comparison.

[1370] By “biological sample” is intended any biological sample obtained from an individual, body fluid, cell line, tissue culture, or other source which contains polypeptide of the present invention or the corresponding mRNA. As indicated, biological samples include body fluids (such as semen, lymph, vaginal pool, sera, plasma, urine, synovial fluid and spinal fluid) which contain the polypeptide of the present invention, and tissue sources found to express the polypeptide of the present invention. Methods for obtaining tissue biopsies and body fluids from mammals are well known in the art. Where the biological sample is to include mRNA, a tissue biopsy is the preferred source.

[1371] The method(s) provided above may preferably be applied in a diagnostic method and/or kits in which polynucleotides and/or polypeptides of the invention are attached to a solid support. In one exemplary method, the support may be a “gene chip” or a “biological chip” as described in U.S. Pat. Nos. 5,837,832, 5,874,219, and 5,856,174. Further, such a gene chip with polynucleotides of the invention attached may be used to identify polymorphisms between the isolated polynucleotide sequences of the invention, with polynucleotides isolated from a test subject. The knowledge of such polymorphisms (i.e. their location, as well as, their existence) would be beneficial in identifying disease loci for many disorders, such as for example, in neural disorders, immune system disorders, muscular disorders, reproductive disorders, gastrointestinal disorders, pulmonary disorders, digestive disorders, metabolic disorders, cardiovascular disorders, renal disorders, proliferative disorders, and/or cancerous diseases and conditions. Such a method is described in U.S. Pat. Nos. 5,858,659 and 5,856,104. The US patents referenced supra are hereby incorporated by reference in their entirety herein.

[1372] The present invention encompasses polynucleotides of the present invention that are chemically synthesized, or reproduced as peptide nucleic acids (PNA), or according to other methods known in the art. The use of PNAs would serve as the preferred form if the polynucleotides of the invention are incorporated onto a solid support, or gene chip. For the purposes of the present invention, a peptide nucleic acid (PNA) is a polyamide type of DNA analog and the monomeric units for adenine, guanine, thymine and cytosine are available commercially (Perceptive Biosystems). Certain components of DNA, such as phosphorus, phosphorus oxides, or deoxyribose derivatives, are not present in PNAs. As disclosed by Nielsen et al., Science 254, 1497 (1991); and Egholm et al., Nature 365, 666 (1993), PNAs bind specifically and tightly to complementary DNA strands and are not degraded by nucleases. In fact, PNA binds more strongly to DNA than DNA itself does. This is probably because there is no electrostatic repulsion between the two strands, and also the polyamide backbone is more flexible. Because of this, PNA/DNA duplexes bind under a wider range of stringency conditions than DNA/DNA duplexes, making it easier to perform multiplex hybridization. Smaller probes can be used than with DNA due to the strong binding. In addition, it is more likely that single base mismatches can be determined with PNA/DNA hybridization because a single mismatch in a PNA/DNA 15-mer lowers the melting point (T.sub.m) by 8°-20° C., vs. 4°-16° C. for the DNA/DNA 15-mer duplex. Also, the absence of charge groups in PNA means that hybridization can be done at low ionic strengths and reduce possible interference by salt during the analysis.

[1373] The compounds of the present invention have uses which include, but are not limited to, detecting cancer in mammals. In particular the invention is useful during diagnosis of pathological cell proliferative neoplasias which include, but are not limited to: acute myelogenous leukemias including acute monocytic leukemia, acute myeloblastic leukemia, acute promyelocytic leukemia, acute myelomonocytic leukemia, acute erythroleukemia, acute megakaryocytic leukemia, and acute undifferentiated leukemia, etc.; and chronic myelogenous leukemias including chronic myelomonocytic leukemia, chronic granulocytic leukemia, etc. Preferred mammals include monkeys, apes, cats, dogs, cows, pigs, horses, rabbits and humans. Particularly preferred are humans.

[1374] Pathological cell proliferative disorders are often associated with inappropriate activation of proto-oncogenes. (Gelmann, E. P. et al., “The Etiology of Acute Leukemia: Molecular Genetics and Viral Oncology,” in Neoplastic Diseases of the Blood, Vol 1., Wiernik, P. H. et al. eds., 161-182 (1985)). Neoplasias are now believed to result from the qualitative alteration of a normal cellular gene product, or from the quantitative modification of gene expression by insertion into the chromosome of a viral sequence, by chromosomal translocation of a gene to a more actively transcribed region, or by some other mechanism. (Gelmann et al., supra) It is likely that mutated or altered expression of specific genes is involved in the pathogenesis of some leukemias, among other tissues and cell types. (Gelmann et al., supra) Indeed, the human counterparts of the oncogenes involved in some animal neoplasias have been amplified or translocated in some cases of human leukemia and carcinoma. (Gelmann et al., supra)

[1375] For example, c-myc expression is highly amplified in the non-lymphocytic leukemia cell line HL-60. When HL-60 cells are chemically induced to stop proliferation, the level of c-myc is found to be downregulated. (International Publication Number WO 91/15580). However, it has been shown that exposure of HL-60 cells to a DNA construct that is complementary to the 5′ end of c-myc or c-myb blocks translation of the corresponding mRNAs which downregulates expression of the c-myc or c-myb proteins and causes arrest of cell proliferation and differentiation of the treated cells. (International Publication Number WO 91/15580; Wickstrom et al., Proc. Natl. Acad. Sci. 85:1028 (1988); Anfossi et al., Proc. Natl. Acad. Sci. 86:3379 (1989)). However, the skilled artisan would appreciate the present invention's usefulness is not be limited to treatment, prevention, and/or prognosis of proliferative disorders of cells and tissues of hematopoietic origin, in light of the numerous cells and cell types of varying origins which are known to exhibit proliferative phenotypes.

[1376] In addition to the foregoing, a polynucleotide of the present invention can be used to control gene expression through triple helix formation or through antisense DNA or RNA. Antisense techniques are discussed, for example, in Okano, J. Neurochem. 56: 560 (1991); “Oligodeoxynucleotides as Antisense Inhibitors of Gene Expression, CRC Press, Boca Raton, Fla. (1988). Triple helix formation is discussed in, for instance Lee et al., Nucleic Acids Research 6: 3073 (1979); Cooney et al., Science 241: 456 (1988); and Dervan et al., Science 251: 1360 (1991). Both methods rely on binding of the polynucleotide to a complementary DNA or RNA. For these techniques, preferred polynucleotides are usually oligonucleotides 20 to 40 bases in length and complementary to either the region of the gene involved in transcription (triple helix—see Lee et al., Nucl. Acids Res. 6:3073 (1979); Cooney et al., Science 241:456 (1988); and Dervan et al., Science 251:1360 (1991)) or to the mRNA itself (antisense—Okano, J. Neurochem. 56:560 (1991); Oligodeoxy-nucleotides as Antisense Inhibitors of Gene Expression, CRC Press, Boca Raton, Fla. (1988)). Triple helix formation optimally results in a shut-off of RNA transcription from DNA, while antisense RNA hybridization blocks translation of an mRNA molecule into polypeptide. The oligonucleotide described above can also be delivered to cells such that the antisense RNA or DNA may be expressed in vivo to inhibit production of polypeptide of the present invention antigens. Both techniques are effective in model systems, and the information disclosed herein can be used to design antisense or triple helix polynucleotides in an effort to treat disease, and in particular, for the treatment of proliferative diseases and/or conditions. Non-limiting antisense and triple helix methods encompassed by the present invention are more thoroughly described elsewhere herein (see, e.g., the section labeled “Antisense and Ribozyme (Antagonists)”).

[1377] Polynucleotides of the present invention are also useful in gene therapy. One goal of gene therapy is to insert a normal gene into an organism having a defective gene, in an effort to correct the genetic defect. The polynucleotides disclosed in the present invention offer a means of targeting such genetic defects in a highly accurate manner. Another goal is to insert a new gene that was not present in the host genome, thereby producing a new trait in the host cell. Additional non-limiting examples of gene therapy methods encompassed by the present invention are more thoroughly described elsewhere herein (see, e.g., the sections labeled “Gene Therapy Methods”, and Examples 16, 17 and 18).

[1378] The polynucleotides are also useful for identifying individuals from minute biological samples. The United States military, for example, is considering the use of restriction fragment length polymorphism (RFLP) for identification of its personnel. In this technique, an individual's genomic DNA is digested with one or more restriction enzymes, and probed on a Southern blot to yield unique bands for identifying personnel. This method does not suffer from the current limitations of “Dog Tags” which can be lost, switched, or stolen, making positive identification difficult. The polynucleotides of the present invention can be used as additional DNA markers for RFLP.

[1379] The polynucleotides of the present invention can also be used as an alternative to RFLP, by determining the actual base-by-base DNA sequence of selected portions of an individual's genome. These sequences can be used to prepare PCR primers for amplifying and isolating such selected DNA, which can then be sequenced. Using this technique, individuals can be identified because each individual will have a unique set of DNA sequences. Once an unique ID database is established for an individual, positive identification of that individual, living or dead, can be made from extremely small tissue samples.

[1380] Forensic biology also benefits from using DNA-based identification techniques as disclosed herein. DNA sequences taken from very small biological samples such as tissues, e.g., hair or skin, or body fluids, e.g., blood, saliva, semen, synovial fluid, amniotic fluid, breast milk, lymph, pulmonary sputum or surfactant, urine, fecal matter, etc., can be amplified using PCR. In one prior art technique, gene sequences amplified from polymorphic loci, such as DQa class II HLA gene, are used in forensic biology to identify individuals. (Erlich, H., PCR Technology, Freeman and Co. (1992)). Once these specific polymorphic loci are amplified, they are digested with one or more restriction enzymes, yielding an identifying set of bands on a Southern blot probed with DNA corresponding to the DQa class II HLA gene. Similarly, polynucleotides of the present invention can be used as polymorphic markers for forensic purposes.

[1381] There is also a need for reagents capable of identifying the source of a particular tissue. Such need arises, for example, in forensics when presented with tissue of unknown origin. Appropriate reagents can comprise, for example, DNA probes or primers prepared from the sequences of the present invention, specific to tissues, including but not limited to those shown in Table 1B. Panels of such reagents can identify tissue by species and/or by organ type. In a similar fashion, these reagents can be used to screen tissue cultures for contamination. Additional non-limiting examples of such uses are further described herein.

[1382] The polynucleotides of the present invention are also useful as hybridization probes for differential identification of the tissue(s) or cell type(s) present in a biological sample. Similarly, polypeptides and antibodies directed to polypeptides of the present invention are useful to provide immunological probes for differential identification of the tissue(s) (e.g., immunohistochemistry assays) or cell type(s) (e.g., immunocytochemistry assays). In addition, for a number of disorders of the above tissues or cells, significantly higher or lower levels of gene expression of the polynucleotides/polypeptides of the present invention may be detected in certain tissues (e.g., tissues expressing polypeptides and/or polynucleotides of the present invention, for example, those disclosed in column 4 of Table 1B, and/or cancerous and/or wounded tissues) or bodily fluids (e.g., semen, lymph, vaginal pool, serum, plasma, urine, synovial fluid or spinal fluid) taken from an individual having such a disorder, relative to a “standard” gene expression level, i.e., the expression level in healthy tissue from an individual not having the disorder.

[1383] Thus, the invention provides a diagnostic method of a disorder, which involves: (a) assaying gene expression level in cells or body fluid of an individual; (b) comparing the gene expression level with a standard gene expression level, whereby an increase or decrease in the assayed gene expression level compared to the standard expression level is indicative of a disorder.

[1384] In the very least, the polynucleotides of the present invention can be used as molecular weight markers on Southern gels, as diagnostic probes for the presence of a specific mRNA in a particular cell type, as a probe to “subtract-out” known sequences in the process of discovering novel polynucleotides, for selecting and making oligomers for attachment to a “gene chip” or other support, to raise anti-DNA antibodies using DNA immunization techniques, and as an antigen to elicit an immune response.

Uses of the Polypeptides

[1385] Each of the polypeptides identified herein can be used in numerous ways. The following description should be considered exemplary and utilizes known techniques.

[1386] Polypeptides and antibodies directed to polypeptides of the present invention are useful to provide immunological probes for differential identification of the tissue(s) (e.g., immunohistochemistry assays such as, for example, ABC immunoperoxidase (Hsu et al., J. Histochem. Cytochem. 29:577-580 (1981)) or cell type(s) (e.g., immunocytochemistry assays).

[1387] Antibodies can be used to assay levels of polypeptides encoded by polynucleotides of the invention in a biological sample using classical immunohistological methods known to those of skill in the art (e.g., see Jalkanen, et al., J. Cell. Biol. 101:976-985 (1985); Jalkanen, et al., J. Cell. Biol. 105:3087-3096 (1987)). Other antibody-based methods useful for detecting protein gene expression include immunoassays, such as the enzyme linked immunosorbent assay (ELISA) and the radioimmunoassay (RIA). Suitable antibody assay labels are known in the art and include enzyme labels, such as, glucose oxidase; radioisotopes, such as iodine (¹³¹I, ¹²⁵I, ¹²³I, ¹²¹I), carbon (¹⁴C), sulfur (³⁵S), tritium (³H), indium (^{115m}In, ^{113m}In, ¹¹²In, ¹¹¹In), and technetium (⁹⁹Tc, ^{99m}Tc), thallium (²⁰¹Ti), gallium (⁶⁸Ga, ⁶⁷Ga), palladium (¹⁰³Pd), molybdenum (⁹⁹Mo), xenon (¹³³Xe), fluorine (¹⁸F), ¹⁵³Sm, ¹⁷⁷Lu, ¹⁵⁹Gd, ¹⁴⁹ Pm, ¹⁴⁹La, ¹⁷⁵Yb, ¹⁶⁶Ho, ⁹⁰Y, ⁴⁷Sc, ¹⁸⁶Re, ¹⁸⁸Re, ¹⁴²Pr, ¹⁰⁵Rh ⁹⁷Ru; luminescent labels, such as luminol; and fluorescent labels, such as fluorescein and rhodamine, and biotin.

[1388] In addition to assaying levels of polypeptide of the present invention in a biological sample, proteins can also be detected in vivo by imaging. Antibody labels or markers for in vivo imaging of protein include those detectable by X-radiography, NMR or ESR. For X-radiography, suitable labels include radioisotopes such as barium or cesium, which emit detectable radiation but are not overtly harmful to the subject. Suitable markers for NMR and ESR include those with a detectable characteristic spin, such as deuterium, which may be incorporated into the antibody by labeling of nutrients for the relevant hybridoma.

[1389] A protein-specific antibody or antibody fragment which has been labeled with an appropriate detectable imaging moiety, such as a radioisotope (for example, ¹³¹I, ¹¹²In, ^{99m}Tc, (¹³¹I, ¹²⁵I, ¹²³I, ¹²¹I), carbon (¹⁴C), sulfur (³⁵S), tritium (³H), indium (^{115m}In, ^{113m}In, ¹¹²In, ¹¹¹In), and technetium (⁹⁹Tc, ^{99m}Tc), thallium (²⁰¹Ti), gallium (⁶⁸Ga, ⁶⁷Ga), palladium (¹⁰³Pd), molybdenum (⁹⁹Mo), xenon (¹³³Xe), fluorine (⁸F, ¹⁵³Sm, ¹⁷⁷Lu, ¹⁵⁹Gd, ¹⁴⁹ Pm, ¹⁴⁰La, ¹⁷⁵Yb, ¹⁶⁶Ho, ⁹⁰Y, ⁴⁷Sc, ¹⁸⁶Re, ¹⁸⁸Re, ¹⁴²Pr, ¹⁰⁵Rh, ⁹⁷Ru), a radio-opaque substance, or a material detectable by nuclear magnetic resonance, is introduced (for example, parenterally, subcutaneously or intraperitoneally) into the mammal to be examined for immune system disorder. It will be understood in the art that the size of the subject and the imaging system used will determine the quantity of imaging moiety needed to produce diagnostic images. In the case of a radioisotope moiety, for a human subject, the quantity of radioactivity injected will normally range from about 5 to 20 millicuries of ^{99m}Tc. The labeled antibody or antibody fragment will then preferentially accumulate at the location of cells which express the polypeptide encoded by a polynucleotide of the invention. In vivo tumor imaging is described in S. W. Burchiel et al., “Immunopharmacokinetics of Radiolabeled Antibodies and Their Fragments” (Chapter 13 in Tumor Imaging: The Radiochemical Detection of Cancer, S. W. Burchiel and B. A. Rhodes, eds., Masson Publishing Inc. (1982)).

[1390] In one embodiment, the invention provides a method for the specific delivery of compositions of the invention to cells by administering polypeptides of the invention (e.g., polypeptides encoded by polynucleotides of the invention and/or antibodies) that are associated with heterologous polypeptides or nucleic acids. In one example, the invention provides a method for delivering a therapeutic protein into the targeted cell. In another example, the invention provides a method for delivering a single stranded nucleic acid (e.g., antisense or ribozymes) or double stranded nucleic acid (e.g., DNA that can integrate into the cell's genome or replicate episomally and that can be transcribed) into the targeted cell.

[1391] In another embodiment, the invention provides a method for the specific destruction of cells (e.g., the destruction of tumor cells) by administering polypeptides of the invention in association with toxins or cytotoxic prodrugs.

[1392] By “toxin” is meant one or more compounds that bind and activate endogenous cytotoxic effector systems, radioisotopes, holotoxins, modified toxins, catalytic subunits of toxins, or any molecules or enzymes not normally present in or on the surface of a cell that under defined conditions cause the cell's death. Toxins that may be used according to the methods of the invention include, but are not limited to, radioisotopes known in the art, compounds such as, for example, antibodies (or complement fixing containing portions thereof) that bind an inherent or induced endogenous cytotoxic effector system, thymidine kinase, endonuclease, RNAse, alpha toxin, ricin, abrin, Pseudomonas exotoxin A, diphtheria toxin, saporin, momordin, gelonin, pokeweed antiviral protein, alpha-sarcin and cholera toxin. “Toxin” also includes a cytostatic or cytocidal agent, a therapeutic agent or a radioactive metal ion, e.g., alpha-emitters such as, for example, ²¹³Bi, or other radioisotopes such as, for example, ¹⁰³Pd, ¹³³Xe, ¹³¹I, ⁶⁸Ge, ⁵⁷Co, ⁶⁵Zn, ⁸⁵Sr, ³²P, ³⁵S, ⁹⁰Y, ¹⁵³Sm, ¹⁵³Gd, ¹⁶⁹Yb, ⁵¹Cr, ⁵⁴Mn, ⁷⁵Se, ¹¹³Sn, ⁹⁰Yttrium, ¹¹⁷Tin, ¹⁸⁶Rhenium, ¹⁶⁶Holmium, and ¹⁸⁸Rhenium; luminescent labels, such as luminol; and fluorescent labels, such as fluorescein and rhodamine, and biotin. In a specific embodiment, the invention provides a method for the specific destruction of cells (e.g., the destruction of tumor cells) by administering polypeptides of the invention or antibodies of the invention in association with the radioisotope ⁹⁰Y. In another specific embodiment, the invention provides a method for the specific destruction of cells (e.g., the destruction of tumor cells) by administering polypeptides of the invention or antibodies of the invention in association with the radioisotope ¹¹¹In. In a further specific embodiment, the invention provides a method for the specific destruction of cells (e.g., the destruction of tumor cells) by administering polypeptides of the invention or antibodies of the invention in association with the radioisotope ¹³¹I.

[1393] Techniques known in the art may be applied to label polypeptides of the invention (including antibodies). Such techniques include, but are not limited to, the use of bifunctional conjugating agents (see e.g., U.S. Pat. Nos. 5,756,065; 5,714,631; 5,696,239; 5,652,361; 5,505,931; 5,489,425; 5,435,990; 5,428,139; 5,342,604; 5,274,119; 4,994,560; and 5,808,003; the contents of each of which are hereby incorporated by reference in its entirety).

[1394] Thus, the invention provides a diagnostic method of a disorder, which involves (a) assaying the expression level of a polypeptide of the present invention in cells or body fluid of an individual; and (b) comparing the assayed polypeptide expression level with a standard polypeptide expression level, whereby an increase or decrease in the assayed polypeptide expression level compared to the standard expression level is indicative of a disorder. With respect to cancer, the presence of a relatively high amount of transcript in biopsied tissue from an individual may indicate a predisposition for the development of the disease, or may provide a means for detecting the disease prior to the appearance of actual clinical symptoms. A more definitive diagnosis of this type may allow health professionals to employ preventative measures or aggressive treatment earlier thereby preventing the development or further progression of the cancer.

[1395] Moreover, polypeptides of the present invention can be used to treat or prevent diseases or conditions such as, for example, neural disorders, immune system disorders, muscular disorders, reproductive disorders, gastrointestinal disorders, pulmonary disorders, cardiovascular disorders, renal disorders, proliferative disorders, and/or cancerous diseases and conditions. For example, patients can be administered a polypeptide of the present invention in an effort to replace absent or decreased levels of the polypeptide (e.g., insulin), to supplement absent or decreased levels of a different polypeptide (e.g., hemoglobin S for hemoglobin B, SOD, catalase, DNA repair proteins), to inhibit the activity of a polypeptide (e.g., an oncogene or tumor supressor), to activate the activity of a polypeptide (e.g., by binding to a receptor), to reduce the activity of a membrane bound receptor by competing with it for free ligand (e.g., soluble TNF receptors used in reducing inflammation), or to bring about a desired response (e.g., blood vessel growth inhibition, enhancement of the immune response to proliferative cells or tissues).

[1396] Similarly, antibodies directed to a polypeptide of the present invention can also be used to treat disease (as described supra, and elsewhere herein). For example, administration of an antibody directed to a polypeptide of the present invention can bind, and/or neutralize the polypeptide, and/or reduce overproduction of the polypeptide. Similarly, administration of an antibody can activate the polypeptide, such as by binding to a polypeptide bound to a membrane (receptor).

[1397] At the very least, the polypeptides of the present invention can be used as molecular weight markers on SDS-PAGE gels or on molecular sieve gel filtration columns using methods well known to those of skill in the art. Polypeptides can also be used to raise antibodies, which in turn are used to measure protein expression from a recombinant cell, as a way of assessing transformation of the host cell. Moreover, the polypeptides of the present invention can be used to test the biological activities described herein.

Diagnostic Assays

[1398] The compounds of the present invention are useful for diagnosis, treatment, prevention and/or prognosis of various disorders in mammals, preferably humans. Such disorders include, but are not limited to, those described in the legends for Tables 1D and 1E and as indicated in the “Preferred Indications” columns in Table 1D and Table 1E; and, also as described herein under the section heading “Biological Activities”.

[1399] For a number of disorders, substantially altered (increased or decreased) levels of gene expression can be detected in tissues, cells or bodily fluids (e.g., sera, plasma, urine, semen, synovial fluid or spinal fluid) taken from an individual having such a disorder, relative to a “standard” gene expression level, that is, the expression level in tissues or bodily fluids from an individual not having the disorder. Thus, the invention provides a diagnostic method useful during diagnosis of a disorder, which involves measuring the expression level of the gene encoding the polypeptide in tissues, cells or body fluid from an individual and comparing the measured gene expression level with a standard gene expression level, whereby an increase or decrease in the gene expression level(s) compared to the standard is indicative of a disorder. These diagnostic assays may be performed in vivo or in vitro, such as, for example, on blood samples, biopsy tissue or autopsy tissue.

[1400] The present invention is also useful as a prognostic indicator, whereby patients exhibiting enhanced or depressed gene expression will experience a worse clinical outcome relative to patients expressing the gene at a level nearer the standard level.

[1401] In certain embodiments, a polypeptide of the invention, or polynucleotides, antibodies, agonists, or antagonists corresponding to that polypeptide, may be used to diagnose and/or prognose diseases and/or disorders associated with the tissue(s) in which the polypeptide of the invention is expressed, including one, two, three, four, five, or more tissues disclosed in Table 1B, column 8 (Tissue Distribution Library Code).

[1402] By “assaying the expression level of the gene encoding the polypeptide” is intended qualitatively or quantitatively measuring or estimating the level of the polypeptide of the invention or the level of the mRNA encoding the polypeptide of the invention in a first biological sample either directly (e.g., by determining or estimating absolute protein level or mRNA level) or relatively (e.g., by comparing to the polypeptide level or mRNA level in a second biological sample). Preferably, the polypeptide expression level or mRNA level in the first biological sample is measured or estimated and compared to a standard polypeptide level or mRNA level, the standard being taken from a second biological sample obtained from an individual not having the disorder or being determined by averaging levels from a population of individuals not having the disorder. As will be appreciated in the art, once a standard polypeptide level or mRNA level is known, it can be used repeatedly as a standard for comparison.

[1403] By “biological sample” is intended any biological sample obtained from an individual, cell line, tissue culture, or other source containing polypeptides of the invention (including portions thereof) or mRNA. As indicated, biological samples include body fluids (such as sera, plasma, urine, synovial fluid and spinal fluid) and tissue sources found to express the full length or fragments thereof of a polypeptide or mRNA. Methods for obtaining tissue biopsies and body fluids from mammals are well known in the art. Where the biological sample is to include mRNA, a tissue biopsy is the preferred source.

[1404] Total cellular RNA can be isolated from a biological sample using any suitable technique such as the single-step guanidinium-thiocyanate-phenol-chloroform method described in Chomczynski and Sacchi, Anal. Biochem. 162:156-159 (1987). Levels of mRNA encoding the polypeptides of the invention are then assayed using any appropriate method. These include Northern blot analysis, S1 nuclease mapping, the polymerase chain reaction (PCR), reverse transcription in combination with the polymerase chain reaction (RT-PCR), and reverse transcription in combination with the ligase chain reaction (RT-LCR).

[1405] The present invention also relates to diagnostic assays such as quantitative and diagnostic assays for detecting levels of polypeptides of the invention, in a biological sample (e.g., cells and tissues), including determination of normal and abnormal levels of polypeptides. Thus, for instance, a diagnostic assay in accordance with the invention for detecting over-expression of polypeptides of the invention compared to normal control tissue samples may be used to detect the presence of tumors. Assay techniques that can be used to determine levels of a polypeptide, such as a polypeptide of the present invention in a sample derived from a host are well-known to those of skill in the art. Such assay methods include radioimmunoassays, competitive-binding assays, Western Blot analysis and ELISA assays. Assaying polypeptide levels in a biological sample can occur using any art-known method.

[1406] Assaying polypeptide levels in a biological sample can occur using antibody-based techniques. For example, polypeptide expression in tissues can be studied with classical immunohistological methods (Jalkanen et al., J. Cell. Biol. 101:976-985 (1985); Jalkanen, M., et al., J. Cell. Biol. 105:3087-3096 (1987)). Other antibody-based methods useful for detecting polypeptide gene expression include immunoassays, such as the enzyme linked immunosorbent assay (ELISA) and the radioimmunoassay (RIA). Suitable antibody assay labels are known in the art and include enzyme labels, such as, glucose oxidase, and radioisotopes, such as iodine (¹²⁵I, ¹²¹I), carbon (¹⁴C), sulfur (³⁵S), tritium (³H), indium (¹¹²In), and technetium (^{99m}Tc), and fluorescent labels, such as fluorescein and rhodamine, and biotin.

[1407] The tissue or cell type to be analyzed will generally include those which are known, or suspected, to express the gene of inteest (such as, for example, cancer). The protein isolation methods employed herein may, for example, be such as those described in Harlow and Lane (Harlow, E. and Lane, D., 1988, “Antibodies: A Laboratory Manual”, Cold Spring Harbor Laboratory Press, Cold Spring Harbor, N.Y.), which is incorporated herein by reference in its entirety. The isolated cells can be derived from cell culture or from a patient. The analysis of cells taken from culture may be a necessary step in the assessment of cells that could be used as part of a cell-based gene therapy technique or, alternatively, to test the effect of compounds on the expression of the gene.

[1408] For example, antibodies, or fragments of antibodies, such as those described herein, may be used to quantitatively or qualitatively detect the presence of gene products or conserved variants or peptide fragments thereof. This can be accomplished, for example, by immunofluorescence techniques employing a fluorescently labeled antibody coupled with light microscopic, flow cytometric, or fluorimetric detection.

[1409] In a preferred embodiment, antibodies, or fragments of antibodies directed to any one or all of the predicted epitope domains of the polypeptides of the invention (shown in column 7 of Table 1B) may be used to quantitatively or qualitatively detect the presence of gene products or conserved variants or peptide fragments thereof. This can be accomplished, for example, by immunofluorescence techniques employing a fluorescently labeled antibody coupled with light microscopic, flow cytometric, or fluorimetric detection.

[1410] In an additional preferred embodiment, antibodies, or fragments of antibodies directed to a conformational epitope of a polypeptide of the invention may be used to quantitatively or qualitatively detect the presence of gene products or conserved variants or peptide fragments thereof. This can be accomplished, for example, by immunofluorescence techniques employing a fluorescently labeled antibody coupled with light microscopic, flow cytometric, or fluorimetric detection.

[1411] The antibodies (or fragments thereof), and/or polypeptides of the present invention may, additionally, be employed histologically, as in immunofluorescence, immunoelectron microscopy or non-immunological assays, for in situ detection of gene products or conserved variants or peptide fragments thereof. In situ detection may be accomplished by removing a histological specimen from a patient, and applying thereto a labeled antibody or polypeptide of the present invention. The antibody (or fragment thereof) or polypeptide is preferably applied by overlaying the labeled antibody (or fragment) onto a biological sample. Through the use of such a procedure, it is possible to determine not only the presence of the gene product, or conserved variants or peptide fragments, or polypeptide binding, but also its distribution in the examined tissue. Using the present invention, those of ordinary skill will readily perceive that any of a wide variety of histological methods (such as staining procedures) can be modified in order to achieve such in situ detection.

[1412] Immunoassays and non-immunoassays for gene products or conserved variants or peptide fragments thereof will typically comprise incubating a sample, such as a biological fluid, a tissue extract, freshly harvested cells, or lysates of cells which have been incubated in cell culture, in the presence of a detectably labeled antibody capable of binding gene products or conserved variants or peptide fragments thereof, and detecting the bound antibody by any of a number of techniques well-known in the art.

[1413] The biological sample may be brought in contact with and immobilized onto a solid phase support or carrier such as nitrocellulose, or other solid support which is capable of immobilizing cells, cell particles or soluble proteins. The support may then be washed with suitable buffers followed by treatment with the detectably labeled antibody or detectable polypeptide of the invention. The solid phase support may then be washed with the buffer a second time to remove unbound antibody or polypeptide. Optionally the antibody is subsequently labeled. The amount of bound label on solid support may then be detected by conventional means.

[1414] By “solid phase support or carrier” is intended any support capable of binding an antigen or an antibody. Well-known supports or carriers include glass, polystyrene, polypropylene, polyethylene, dextran, nylon, amylases, natural and modified celluloses, polyacrylamides, gabbros, and magnetite. The nature of the carrier can be either soluble to some extent or insoluble for the purposes of the present invention. The support material may have virtually any possible structural configuration so long as the coupled molecule is capable of binding to an antigen or antibody. Thus, the support configuration may be spherical, as in a bead, or cylindrical, as in the inside surface of a test tube, or the external surface of a rod. Alternatively, the surface may be flat such as a sheet, test strip, etc. Preferred supports include polystyrene beads. Those skilled in the art will know many other suitable carriers for binding antibody or antigen, or will be able to ascertain the same by use of routine experimentation.

[1415] The binding activity of a given lot of antibody or antigen polypeptide may be determined according to well known methods. Those skilled in the art will be able to determine operative and optimal assay conditions for each determination by employing routine experimentation.

[1416] In addition to assaying polypeptide levels or polynucleotide levels in a biological sample obtained from an individual, polypeptide or polynucleotide can also be detected in vivo by imaging. For example, in one embodiment of the invention, polypeptides and/or antibodies of the invention are used to image diseased cells, such as neoplasms. In another embodiment, polynucleotides of the invention (e.g., polynucleotides complementary to all or a portion of an mRNA) and/or antibodies (e.g., antibodies directed to any one or a combination of the epitopes of a polypeptide of the invention, antibodies directed to a conformational epitope of a polypeptide of the invention, or antibodies directed to the full length polypeptide expressed on the cell surface of a mammalian cell) are used to image diseased or neoplastic cells.

[1417] Antibody labels or markers for in vivo imaging of polypeptides of the invention include those detectable by X-radiography, NMR, MRI, CAT-scans or ESR. For X-radiography, suitable labels include radioisotopes such as barium or cesium, which emit detectable radiation but are not overtly harmful to the subject. Suitable markers for NMR and ESR include those with a detectable characteristic spin, such as deuterium, which may be incorporated into the antibody by labeling of nutrients for the relevant hybridoma. Where in vivo imaging is used to detect enhanced levels of polypeptides for diagnosis in humans, it may be preferable to use human antibodies or “humanized” chimeric monoclonal antibodies. Such antibodies can be produced using techniques described herein or otherwise known in the art. For example methods for producing chimeric antibodies are known in the art. See, for review, Morrison, Science 229:1202 (1985); Oi et al., BioTechniques 4:214 (1986); Cabilly et al., U.S. Pat. No. 4,816,567; Taniguchi et al., EP 171496; Morrison et al., EP 173494; Neuberger et al., WO 8601533; Robinson et al., WO 8702671; Boulianne et al., Nature 312:643 (1984); Neuberger et al., Nature 314:268 (1985).

[1418] Additionally, any polypeptides of the invention whose presence can be detected, can be administered. For example, polypeptides of the invention labeled with a radio-opaque or other appropriate compound can be administered and visualized in vivo, as discussed, above for labeled antibodies. Further, such polypeptides can be utilized for in vitro diagnostic procedures.

[1419] A polypeptide-specific antibody or antibody fragment which has been labeled with an appropriate detectable imaging moiety, such as a radioisotope (for example, ¹³¹I, ¹¹²In, ^{99m}Tc), a radio-opaque substance, or a material detectable by nuclear magnetic resonance, is introduced (for example, parenterally, subcutaneously or intraperitoneally) into the mammal to be examined for a disorder. It will be understood in the art that the size of the subject and the imaging system used will determine the quantity of imaging moiety needed to produce diagnostic images. In the case of a radioisotope moiety, for a human subject, the quantity of radioactivity injected will normally range from about 5 to 20 millicuries of ^{99m}Tc. The labeled antibody or antibody fragment will then preferentially accumulate at the location of cells which contain the antigenic protein. In vivo tumor imaging is described in S. W. Burchiel et al., “Immunopharmacokinetics of Radiolabeled Antibodies and Their Fragments” (Chapter 13 in Tumor Imaging: The Radiochemical Detection of Cancer, S. W. Burchiel and B. A. Rhodes, eds., Masson Publishing Inc. (1982)).

[1420] With respect to antibodies, one of the ways in which an antibody of the present invention can be detectably labeled is by linking the same to a reporter enzyme and using the linked product in an enzyme immunoassay (EIA) (Voller, A., “The Enzyme Linked Immunosorbent Assay (ELISA)”, 1978, Diagnostic Horizons 2:1-7, Microbiological Associates Quarterly Publication, Walkersville, Md.); Voller et al., J. Clin. Pathol. 31:507-520 (1978); Butler, J. E., Meth. Enzymol. 73:482-523 (1981); Maggio, E. (ed.), 1980, Enzyme Immunoassay, CRC Press, Boca Raton, Fla.; Ishikawa, E. et al., (eds.), 1981, Enzyme Immunoassay, Kgaku Shoin, Tokyo). The reporter enzyme which is bound to the antibody will react with an appropriate substrate, preferably a chromogenic substrate, in such a manner as to produce a chemical moiety which can be detected, for example, by spectrophotometric, fluorimetric or by visual means. Reporter enzymes which can be used to detectably label the antibody include, but are not limited to, malate dehydrogenase, staphylococcal nuclease, delta-5-steroid isomerase, yeast alcohol dehydrogenase, alpha-glycerophosphate, dehydrogenase, triose phosphate isomerase, horseradish peroxidase, alkaline phosphatase, asparaginase, glucose oxidase, beta-galactosidase, ribonuclease, urease, catalase, glucose-6-phosphate dehydrogenase, glucoamylase and acetylcholinesterase. Additionally, the detection can be accomplished by colorimetric methods which employ a chromogenic substrate for the reporter enzyme. Detection may also be accomplished by visual comparison of the extent of enzymatic reaction of a substrate in comparison with similarly prepared standards.

[1421] Detection may also be accomplished using any of a variety of other immunoassays. For example, by radioactively labeling the antibodies or antibody fragments, it is possible to detect polypeptides through the use of a radioimmunoassay (RIA) (see, for example, Weintraub, B., Principles of Radioimmunoassays, Seventh Training Course on Radioligand Assay Techniques, The Endocrine Society, March, 1986, which is incorporated by reference herein). The radioactive isotope can be detected by means including, but not limited to, a gamma counter, a scintillation counter, or autoradiography.

[1422] It is also possible to label the antibody with a fluorescent compound. When the fluorescently labeled antibody is exposed to light of the proper wave length, its presence can then be detected due to fluorescence. Among the most commonly used fluorescent labeling compounds are fluorescein isothiocyanate, rhodamine, phycoerythrin, phycocyanin, allophycocyanin, ophthaldehyde and fluorescamine.

[1423] The antibody can also be detectably labeled using fluorescence emitting metals such as ¹⁵²Eu, or others of the lanthanide series. These metals can be attached to the antibody using such metal chelating groups as diethylenetriaminepentacetic acid (DTPA) or ethylenediaminetetraacetic acid (EDTA).

[1424] The antibody also can be detectably labeled by coupling it to a chemiluminescent compound. The presence of the chemiluminescent-tagged antibody is then determined by detecting the presence of luminescence that arises during the course of a chemical reaction. Examples of particularly useful chemiluminescent labeling compounds are luminol, isoluminol, theromatic acridinium ester, imidazole, acridinium salt and oxalate ester.

[1425] Likewise, a bioluminescent compound may be used to label the antibody of the present invention. Bioluminescence is a type of chemiluminescence found in biological systems in, which a catalytic protein increases the efficiency of the chemiluminescent reaction. The presence of a bioluminescent protein is determined by detecting the presence of luminescence. Important bioluminescent compounds for purposes of labeling are luciferin, luciferase and aequorin.

Methods for Detecting Diseases

[1426] In general, a disease may be detected in a patient based on the presence of one or more proteins of the invention and/or polynucleotides encoding such proteins in a biological sample (for example, blood, sera, urine, and/or tumor biopsies) obtained from the patient. In other words, such proteins may be used as markers to indicate the presence or absence of a disease or disorder, including cancer and/or as described elsewhere herein. In addition, such proteins may be useful for the detection of other diseases and cancers. The binding agents provided herein generally permit detection of the level of antigen that binds to the agent in the biological sample. Polynucleotide primers and probes may be used to detect the level of mRNA encoding polypeptides of the invention, which is also indicative of the presence or absence of a disease or disorder, including cancer. In general, polypeptides of the invention should be present at a level that is at least three fold higher in diseased tissue than in normal tissue.

[1427] There are a variety of assay formats known to those of ordinary skill in the art for using a binding agent to detect polypeptide markers in a sample. See, e.g., Harlow and Lane, supra. In general, the presence or absence of a disease in a patient may be determined by (a) contacting a biological sample obtained from a patient with a binding agent; (b) detecting in the sample a level of polypeptide that binds to the binding agent; and (c) comparing the level of polypeptide with a predetermined cut-off value.

[1428] In a preferred embodiment, the assay involves the use of a binding agent(s) immobilized on a solid support to bind to and remove the polypeptide of the invention from the remainder of the sample. The bound polypeptide may then be detected using a detection reagent that contains a reporter group and specifically binds to the binding agent/polypeptide complex. Such detection reagents may comprise, for example, a binding agent that specifically binds to the polypeptide or an antibody or other agent that specifically binds to the binding agent, such as an anti-immunoglobulin, protein G, protein A or a lectin. Alternatively, a competitive assay may be utilized, in which a polypeptide is labeled with a reporter group and allowed to bind to the immobilized binding agent after incubation of the binding agent with the sample. The extent to which components of the sample inhibit the binding of the labeled polypeptide to the binding agent is indicative of the reactivity of the sample with the immobilized binding agent. Suitable polypeptides for use within such assays include polypeptides of the invention and portions thereof, or antibodies, to which the binding agent binds, as described above.

[1429] The solid support may be any material known to those of skill in the art to which polypeptides of the invention may be attached. For example, the solid support may be a test well in a microtiter plate or a nitrocellulose or other suitable membrane. Alternatively, the support may be a bead or disc, such as glass fiberglass, latex or a plastic material such as polystyrene or polyvinylchloride. The support may also be a magnetic particle or a fiber optic sensor, such as those disclosed, for example, in U.S. Pat. No. 5,359,681. The binding agent may be immobilized on the solid support using a variety of techniques known to those of skill in the art, which are amply described in the patent and scientific literature. In the context of the present invention, the term “immobilization” refers to both noncovalent association, such as adsorption, and covalent attachment (which may be a direct linkage between the agent and functional groups on the support or may be a linkage by way of a cross-linking agent). Immobilization by adsorption to a well in a microtiter plate or to a membrane is preferred. In such cases, adsorption may be achieved by contacting the binding agent, in a suitable buffer, with the solid support for the suitable amount of time. The contact time varies with temperature, but is typically between about 1 hour and about 1 day. In general, contacting a well of plastic microtiter plate (such as polystyrene or polyvinylchloride) with an amount of binding agent ranging from about 10 ng to about 10 ug, and preferably about 100 ng to about 1 ug, is sufficient to immobilize an adequate amount of binding agent.

[1430] Covalent attachment of binding agent to a solid support may generally be achieved by first reacting the support with a bifunctional reagent that will react with both the support and a functional group, such as a hydroxyl or amino group, on the binding agent. For example, the binding agent may be covalently attached to supports having an appropriate polymer coating using benzoquinone or by condensation of an aldehyde group on the support with an amine and an active hydrogen on the binding partner (see, e.g., Pierce Immunotechnology Catalog and Handbook, 1991, at A12-A13).

Gene Therapy Methods

[1431] Also encompassed by the invention are gene therapy methods for treating or preventing disorders, diseases and conditions. The gene therapy methods relate to the introduction of nucleic acid (DNA, RNA and antisense DNA or RNA) sequences into an animal to achieve expression of the polypeptide of the present invention. This method requires a polynucleotide which codes for a polypeptide of the present invention operatively linked to a promoter and any other genetic elements necessary for the expression of the polypeptide by the target tissue. Such gene therapy and delivery techniques are known in the art, see, for example, WO90/11092, which is herein incorporated by reference.

[1432] Thus, for example, cells from a patient may be engineered with a polynucleotide (DNA or RNA) comprising a promoter operably linked to a polynucleotide of the present invention ex vivo, with the engineered cells then being provided to a patient to be treated with the polypeptide of the present invention. Such methods are well-known in the art. For example, see Belldegrun, A., et al., J. Natl. Cancer Inst. 85: 207-216 (1993); Ferrantini, M. et al., Cancer Research 53: 1107-1112 (1993); Ferrantini, M. et al., J. Immunology 153: 4604-4615 (1994); Kaido, T., et al., Int. J. Cancer 60: 221-229 (1995); Ogura, H., et al., Cancer Research 50: 5102-5106 (1990); Santodonato, L., et al., Human Gene Therapy 7:1-10 (1996); Santodonato, L., et al., Gene Therapy 4:1246-1255 (1997); and Zhang, J.-F. et al., Cancer Gene Therapy 3: 31-38 (1996)), which are herein incorporated by reference. In one embodiment, the cells which are engineered are arterial cells. The arterial cells may be reintroduced into the patient through direct injection to the artery, the tissues surrounding the artery, or through catheter injection.

[1433] As discussed in more detail below, the polynucleotide constructs can be delivered by any method that delivers injectable materials to the cells of an animal, such as, injection into the interstitial space of tissues (heart, muscle, skin, lung, liver, and the like). The polynucleotide constructs may be delivered in a pharmaceutically acceptable liquid or aqueous carrier.

[1434] In one embodiment, the polynucleotide of the present invention is delivered as a naked polynucleotide. The term “naked” polynucleotide, DNA or RNA refers to sequences that are free from any delivery vehicle that acts to assist, promote or facilitate entry into the cell, including viral sequences, viral particles, liposome formulations, lipofectin or precipitating agents and the like. However, the polynucleotide of the present invention can also be delivered in liposome formulations and lipofectin formulations and the like can be prepared by methods well known to those skilled in the art. Such methods are described, for example, in U.S. Pat. Nos. 5,593,972, 5,589,466, and 5,580,859, which are herein incorporated by reference.

[1435] The polynucleotide vector constructs used in the gene therapy method are preferably constructs that will not integrate into the host genome nor will they contain sequences that allow for replication. Appropriate vectors include pWLNEO, pSV2CAT, pOG44, pXT1 and pSG available from Stratagene; pSVK3, pBPV, pMSG and pSVL available from Pharmacia; and pEF1/V5, pcDNA3.1, and pRc/CMV2 available from Invitrogen. Other suitable vectors will be readily apparent to the skilled artisan.

[1436] Any strong promoter known to those skilled in the art can be used for driving the expression of the polynucleotide sequence. Suitable promoters include adenoviral promoters, such as the adenoviral major late promoter; or heterologous promoters, such as the cytomegalovirus (CMV) promoter; the respiratory syncytial virus (RSV) promoter; inducible promoters, such as the MMT promoter, the metallothionein promoter; heat shock promoters; the albumin promoter; the ApoAI promoter; human globin promoters; viral thymidine kinase promoters, such as the Herpes Simplex thymidine kinase promoter; retroviral LTRs; the b-actin promoter; and human growth hormone promoters. The promoter also may be the native promoter for the polynucleotide of the present invention.

[1437] Unlike other gene therapy techniques, one major advantage of introducing naked nucleic acid sequences into target cells is the transitory nature of the polynucleotide synthesis in the cells. Studies have shown that non-replicating DNA sequences can be introduced into cells to provide production of the desired polypeptide for periods of up to six months.

[1438] The polynucleotide construct can be delivered to the interstitial space of tissues within the an animal, including of muscle, skin, brain, lung, liver, spleen, bone marrow, thymus, heart, lymph, blood, bone, cartilage, pancreas, kidney, gall bladder, stomach, intestine, testis, ovary, uterus, rectum, nervous system, eye, gland, and connective tissue. Interstitial space of the tissues comprises the intercellular, fluid, mucopolysaccharide matrix among the reticular fibers of organ tissues, elastic fibers in the walls of vessels or chambers, collagen fibers of fibrous tissues, or that same matrix within connective tissue ensheathing muscle cells or in the lacunae of bone. It is similarly the space occupied by the plasma of the circulation and the lymph fluid of the lymphatic channels. Delivery to the interstitial space of muscle tissue is preferred for the reasons discussed below. They may be conveniently delivered by injection into the tissues comprising these cells. They are preferably delivered to and expressed in persistent, non-dividing cells which are differentiated, although delivery and expression may be achieved in non-differentiated or less completely differentiated cells, such as, for example, stem cells of blood or skin fibroblasts. In vivo muscle cells are particularly competent in their ability to take up and express polynucleotides.

[1439] For the naked nucleic acid sequence injection, an effective dosage amount of DNA or RNA will be in the range of from about 0.05 mg/kg body weight to about 50 mg/kg body weight. Preferably the dosage will be from about 0.005 mg/kg to about 20 mg/kg and more preferably from about 0.05 mg/kg to about 5 mg/kg. Of course, as the artisan of ordinary skill will appreciate, this dosage will vary according to the tissue site of injection. The appropriate and effective dosage of nucleic acid sequence can readily be determined by those of ordinary skill in the art and may depend on the condition being treated and the route of administration.

[1440] The preferred route of administration is by the parenteral route of injection into the interstitial space of tissues. However, other parenteral routes may also be used, such as, inhalation of an aerosol formulation particularly for delivery to lungs or bronchial tissues, throat or mucous membranes of the nose. In addition, naked DNA constructs can be delivered to arteries during angioplasty by the catheter used in the procedure.

[1441] The naked polynucleotides are delivered by any method known in the art, including, but not limited to, direct needle injection at the delivery site, intravenous injection, topical administration, catheter infusion, and so-called “gene guns”. These delivery methods are known in the art.

[1442] The constructs may also be delivered with delivery vehicles such as viral sequences, viral particles, liposome formulations, lipofectin, precipitating agents, etc. Such methods of delivery are known in the art.

[1443] In certain embodiments, the polynucleotide constructs are complexed in a liposome preparation. Liposomal preparations for use in the instant invention include cationic (positively charged), anionic (negatively charged) and neutral preparations. However, cationic liposomes are particularly preferred because a tight charge complex can be formed between the cationic liposome and the polyanionic nucleic acid. Cationic liposomes have been shown to mediate intracellular delivery of plasmid DNA (Felgner et al., Proc. Natl. Acad. Sci. USA (1987) 84:7413-7416, which is herein incorporated by reference); mRNA (Malone et al., Proc. Natl. Acad. Sci. USA (1989) 86:6077-6081, which is herein incorporated by reference); and purified transcription factors (Debs et al., J. Biol. Chem. (1990) 265:10189-10192, which is herein incorporated by reference), in functional form.

[1444] Cationic liposomes are readily available. For example, N[1-2,3-dioleyloxy)propyl]-N,N,N-triethylammonium (DOTMA) liposomes are particularly useful and are available under the trademark Lipofectin, from GIBCO BRL, Grand Island, N.Y. (See, also, Felgner et al., Proc. Natl. Acad. Sci. USA (1987) 84:7413-7416, which is herein incorporated by reference). Other commercially available liposomes include transfectace (DDAB/DOPE) and DOTAP/DOPE (Boehringer).

[1445] Other cationic liposomes can be prepared from readily available materials using techniques well known in the art. See, e.g. PCT Publication No. WO 90/11092 (which is herein incorporated by reference) for a description of the synthesis of DOTAP (1,2-bis(oleoyloxy)-3-(trimethylammonio)propane) liposomes. Preparation of DOTMA liposomes is explained in the literature, see, e.g., P. Felgner et al., Proc. Natl. Acad. Sci. USA 84:7413-7417, which is herein incorporated by reference. Similar methods can be used to prepare liposomes from other cationic lipid materials.

[1446] Similarly, anionic and neutral liposomes are readily available, such as from Avanti Polar Lipids (Birmingham, Ala.), or can be easily prepared using readily available materials. Such materials include phosphatidyl, choline, cholesterol, phosphatidyl ethanolamine, dioleoylphosphatidyl choline (DOPC), dioleoylphosphatidyl glycerol (DOPG), dioleoylphoshatidyl ethanolamine (DOPE), among others. These materials can also be mixed with the DOTMA and DOTAP starting materials in appropriate ratios. Methods for making liposomes using these materials are well known in the art.

[1447] For example, commercially dioleoylphosphatidyl choline (DOPC), dioleoylphosphatidyl glycerol (DOPG), and dioleoylphosphatidyl ethanolamine (DOPE) can be used in various combinations to make conventional liposomes, with or without the addition of cholesterol. Thus, for example, DOPG/DOPC vesicles can be prepared by drying 50 mg each of DOPG and DOPC under a stream of nitrogen gas into a sonication vial. The sample is placed under a vacuum pump overnight and is hydrated the following day with deionized water. The sample is then sonicated for 2 hours in a capped vial, using a Heat Systems model 350 sonicator equipped with an inverted cup (bath type) probe at the maximum setting while the bath is circulated at 15EC. Alternatively, negatively charged vesicles can be prepared without sonication to produce multilamellar vesicles or by extrusion through nucleopore membranes to produce unilamellar vesicles of discrete size. Other methods are known and available to those of skill in the art.

[1448] The liposomes can comprise multilamellar vesicles (MLVs), small unilamellar vesicles (SUVs), or large unilamellar vesicles (LUVs), with SUVs being preferred. The various liposome-nucleic acid complexes are prepared using methods well known in the art. See, e.g., Straubinger et al., Methods of Immunology (1983), 101:512-527, which is herein incorporated by reference. For example, MLVs containing nucleic acid can be prepared by depositing a thin film of phospholipid on the walls of a glass tube and subsequently hydrating with a solution of the material to be encapsulated. SUVs are prepared by extended sonication of MLVs to produce a homogeneous population of unilamellar liposomes. The material to be entrapped is added to a suspension of preformed MLVs and then sonicated. When using liposomes containing cationic lipids, the dried lipid film is resuspended in an appropriate solution such as sterile water or an isotonic buffer solution such as 10 mM Tris/NaCl, sonicated, and then the preformed liposomes are mixed directly with the DNA. The liposome and DNA form a very stable complex due to binding of the positively charged liposomes to the cationic DNA. SUVs find use with small nucleic acid fragments. LUVs are prepared by a number of methods, well known in the art. Commonly used methods include Ca²⁺-EDTA chelation (Papahadjopoulos et al., Biochim. Biophys. Acta (1975) 394:483; Wilson et al., Cell 17:77 (1979)); ether injection (Deamer, D. and Bangham, A., Biochim. Biophys. Acta 443:629 (1976); Ostro et al., Biochem. Biophys. Res. Commun. 76:836 (1977); Fraley et al., Proc. Natl. Acad. Sci. USA 76:3348 (1979)); detergent dialysis (Enoch, H. and Strittmatter, P., Proc. Natl. Acad. Sci. USA 76:145 (1979)); and reverse-phase evaporation (REV) (Fraley et al., J. Biol. Chem. 255:10431 (1980); Szoka, F. and Papahadjopoulos, D., Proc. Natl. Acad. Sci. USA 75:145 (1978); Schaefer-Ridder et al., Science 215:166 (1982)), which are herein incorporated by reference.

[1449] Generally, the ratio of DNA to liposomes will be from about 10:1 to about 1:10. Preferably, the ration will be from about 5:1 to about 1:5. More preferably, the ration will be about 3:1 to about 1:3. Still more preferably, the ratio will be about 1:1.

[1450] U.S. Pat. No. 5,676,954 (which is herein incorporated by reference) reports on the injection of genetic material, complexed with cationic liposomes carriers, into mice. U.S. Pat. Nos. 4,897,355, 4,946,787, 5,049,386, 5,459,127, 5,589,466, 5,693,622, 5,580,859, 5,703,055, and international publication no. WO 94/9469 (which are herein incorporated by reference) provide cationic lipids for use in transfecting DNA into cells and mammals. U.S. Pat. Nos. 5,589,466, 5,693,622, 5,580,859, 5,703,055, and international publication no. WO 94/9469 provide methods for delivering DNA-cationic lipid complexes to mammals.

[1451] In certain embodiments, cells are engineered, ex vivo or in vivo, using a retroviral particle containing RNA which comprises a sequence encoding a polypeptide of the present invention. Retroviruses from which the retroviral plasmid vectors may be derived include, but are not limited to, Moloney Murine Leukemia Virus, spleen necrosis virus, Rous sarcoma Virus, Harvey Sarcoma Virus, avian leukosis virus, gibbon ape leukemia virus, human immunodeficiency virus, Myeloproliferative Sarcoma Virus, and mammary tumor virus.

[1452] The retroviral plasmid vector is employed to transduce packaging cell lines to form producer cell lines. Examples of packaging cells which may be transfected include, but are not limited to, the PE501, PA317, R-2, R-AM, PA12, T19-14×, VT-19-17-H2, RCRE, RCRIP, GP+E-86, GP+envAm12, and DAN cell lines as described in Miller, Human Gene Therapy 1:5-14 (1990), which is incorporated herein by reference in its entirety. The vector may transduce the packaging cells through any means known in the art. Such means include, but are not limited to, electroporation, the use of liposomes, and CaPO₄ precipitation. In one alternative, the retroviral plasmid vector may be encapsulated into a liposome, or coupled to a lipid, and then administered to a host.

[1453] The producer cell line generates infectious retroviral vector particles which include polynucleotide encoding a polypeptide of the present invention. Such retroviral vector particles then may be employed, to transduce eukaryotic cells, either in vitro or in vivo. The transduced eukaryotic cells will express a polypeptide of the present invention.

[1454] In certain other embodiments, cells are engineered, ex vivo or in vivo, with polynucleotide contained in an adenovirus vector. Adenovirus can be manipulated such that it encodes and expresses a polypeptide of the present invention, and at the same time is inactivated in terms of its ability to replicate in a normal lytic viral life cycle. Adenovirus expression is achieved without integration of the viral DNA into the host cell chromosome, thereby alleviating concerns about insertional mutagenesis. Furthermore, adenoviruses have been used as live enteric vaccines for many years with an excellent safety profile (Schwartz et al. Am. Rev. Respir. Dis. 109:233-238 (1974)). Finally, adenovirus mediated gene transfer has been demonstrated in a number of instances including transfer of alpha-1-antitrypsin and CFTR to the lungs of cotton rats (Rosenfeld, M. A. et al. (1991) Science 252:431-434; Rosenfeld et al., (1992) Cell 68:143-155). Furthermore, extensive studies to attempt to establish adenovirus as a causative agent in human cancer were uniformly negative (Green, M. et al. (1979) Proc. Natl. Acad. Sci. USA 76:6606).

[1455] Suitable adenoviral vectors useful in the present invention are described, for example, in Kozarsky and Wilson, Curr. Opin. Genet. Devel. 3:499-503 (1993); Rosenfeld et al., Cell 68:143-155 (1992); Engelhardt et al., Human Genet. Ther. 4:759-769 (1993); Yang et al., Nature Genet. 7:362-369 (1994); Wilson et al., Nature 365:691-692 (1993); and U.S. Pat. No. 5,652,224, which are herein incorporated by reference. For example, the adenovirus vector Ad2 is useful and can be grown in human 293 cells. These cells contain the E1 region of adenovirus and constitutively express E1a and E1b, which complement the defective adenoviruses by providing the products of the genes deleted from the vector. In addition to Ad2, other varieties of adenovirus (e.g., Ad3, Ad5, and Ad7) are also useful in the present invention.

[1456] Preferably, the adenoviruses used in the present invention are replication deficient. Replication deficient adenoviruses require the aid of a helper virus and/or packaging cell line to form infectious particles. The resulting virus is capable of infecting cells and can express a polynucleotide of interest which is operably linked to a promoter, but cannot replicate in most cells. Replication deficient adenoviruses may be deleted in one or more of all or a portion of the following genes: E1a, E1b, E3, E4, E2a, or L1 through L5.

[1457] In certain other embodiments, the cells are engineered, ex vivo or in vivo, using an adeno-associated virus (AAV). AAVs are naturally occurring defective viruses that require helper viruses to produce infectious particles (Muzyczka, N., Curr. Topics in Microbiol. Immunol. 158:97 (1992)). It is also one of the few viruses that may integrate its DNA into non-dividing cells. Vectors containing as little as 300 base pairs of AAV can be packaged and can integrate, but space for exogenous DNA is limited to about 4.5 kb. Methods for producing and using such AAVs are known in the art. See, for example, U.S. Pat. Nos. 5,139,941, 5,173,414, 5,354,678, 5,436,146, 5,474,935, 5,478,745, and 5,589,377.

[1458] For example, an appropriate AAV vector for use in the present invention will include all the sequences necessary for DNA replication, encapsidation, and host-cell integration. The polynucleotide construct is inserted into the AAV vector using standard cloning methods, such as those found in Sambrook et al., Molecular Cloning: A Laboratory Manual, Cold Spring Harbor Press (1989). The recombinant AAV vector is then transfected into packaging cells which are infected with a helper virus, using any standard technique, including lipofection, electroporation, calcium phosphate precipitation, etc. Appropriate helper viruses include adenoviruses, cytomegaloviruses, vaccinia viruses, or herpes viruses. Once the packaging cells are transfected and infected, they will produce infectious AAV viral particles which contain the polynucleotide construct. These viral particles are then used to transduce eukaryotic cells, either ex vivo or in vivo. The transduced cells will contain the polynucleotide construct integrated into its genome, and will express a polypeptide of the invention.

[1459] Another method of gene therapy involves operably associating heterologous control regions and endogenous polynucleotide sequences (e.g. encoding a polypeptide of the present invention) via homologous recombination (see, e.g., U.S. Pat. No. 5,641,670, issued Jun. 24, 1997; International Publication No. WO 96/29411, published Sep. 26, 1996; International Publication No. WO 94/12650, published Aug. 4, 1994; Koller et al., Proc. Natl. Acad. Sci. USA 86:8932-8935 (1989); and Zijlstra et al., Nature 342:435-438 (1989), which are herein encorporated by reference. This method involves the activation of a gene which is present in the target cells, but which is not normally expressed in the cells, or is expressed at a lower level than desired.

[1460] Polynucleotide constructs are made, using standard techniques known in the art, which contain the promoter with targeting sequences flanking the promoter. Suitable promoters are described herein. The targeting sequence is sufficiently complementary to an endogenous sequence to permit homologous recombination of the promoter-targeting sequence with the endogenous sequence. The targeting sequence will be sufficiently near the 5′ end of the desired endogenous polynucleotide sequence so the promoter will be operably linked to the endogenous sequence upon homologous recombination.

[1461] The promoter and the targeting sequences can be amplified using PCR. Preferably, the amplified promoter contains distinct restriction enzyme sites on the 5′ and 3′ ends. Preferably, the 3′ end of the first targeting sequence contains the same restriction enzyme site as the 5′ end of the amplified promoter and the 5′ end of the second targeting sequence contains the same restriction site as the 3′ end of the amplified promoter. The amplified promoter and targeting sequences are digested and ligated together.

[1462] The promoter-targeting sequence construct is delivered to the cells, either as naked polynucleotide, or in conjunction with transfection-facilitating agents, such as liposomes, viral sequences, viral particles, whole viruses, lipofection, precipitating agents, etc., described in more detail above. The P promoter-targeting sequence can be delivered by any method, included direct needle injection, intravenous injection, topical administration, catheter infusion, particle accelerators, etc. The methods are described in more detail below.

[1463] The promoter-targeting sequence construct is taken up by cells. Homologous recombination between the construct and the endogenous sequence takes place, such that an endogenous sequence is placed under the control of the promoter. The promoter then drives the expression of the endogenous sequence.

[1464] The polynucleotide encoding a polypeptide of the present invention may contain a secretory signal sequence that facilitates secretion of the protein. Typically, the signal sequence is positioned in the coding region of the polynucleotide to be expressed towards or at the 5′ end of the coding region. The signal sequence may be homologous or heterologous to the polynucleotide of interest and may be homologous or heterologous to the cells to be transfected. Additionally, the signal sequence may be chemically synthesized using methods known in the art.

[1465] Any mode of administration of any of the above-described polynucleotides constructs can be used so long as the mode results in the expression of one or more molecules in an amount sufficient to provide a therapeutic effect. This includes direct needle injection, systemic injection, catheter infusion, biolistic injectors, particle accelerators (i.e., “gene guns”), gelfoam sponge depots, other commercially available depot materials, osmotic pumps (e.g., Alza minipumps), oral or suppositorial solid (tablet or pill) pharmaceutical formulations, and decanting or topical applications during surgery. For example, direct injection of naked calcium phosphate-precipitated plasmid into rat liver and rat spleen or a protein-coated plasmid into the portal vein has resulted in gene expression of the foreign gene in the rat livers (Kaneda et al., Science 243:375 (1989)).

[1466] A preferred method of local administration is by direct injection. Preferably, a recombinant molecule of the present invention complexed with a delivery vehicle is administered by direct injection into or locally within the area of arteries. Administration of a composition locally within the area of arteries refers to injecting the composition centimeters and preferably, millimeters within arteries.

[1467] Another method of local administration is to contact a polynucleotide construct of the present invention in or around a surgical wound. For example, a patient can undergo surgery and the polynucleotide construct can be coated on the surface of tissue inside the wound or the construct can be injected into areas of tissue inside the wound.

[1468] Therapeutic compositions useful in systemic administration, include recombinant molecules of the present invention complexed to a targeted delivery vehicle of the present invention. Suitable delivery vehicles for use with systemic administration comprise liposomes comprising ligands for targeting the vehicle to a particular site. In specific embodiments, suitable delivery vehicles for use with systemic administration comprise liposomes comprising polypeptides of the invention for targeting the vehicle to a particular site.

[1469] Preferred methods of systemic administration, include intravenous injection, aerosol, oral and percutaneous (topical) delivery. Intravenous injections can be performed using methods standard in the art. Aerosol delivery can also be performed using methods standard in the art (see, for example, Stribling et al., Proc. Natl. Acad. Sci. USA 189:11277-11281, 1992, which is incorporated herein by reference). Oral delivery can be performed by complexing a polynucleotide construct of the present invention to a carrier capable of withstanding degradation by digestive enzymes in the gut of an animal. Examples of such carriers, include plastic capsules or tablets, such as those known in the art. Topical delivery can be performed by mixing a polynucleotide construct of the present invention with a lipophilic reagent (e.g., DMSO) that is capable of passing into the skin.

[1470] Determining an effective amount of substance to be delivered can depend upon a number of factors including, for example, the chemical structure and biological activity of the substance, the age and weight of the animal, the precise condition requiring treatment and its severity, and the route of administration. The frequency of treatments depends upon a number of factors, such as the amount of polynucleotide constructs administered per dose, as well as the health and history of the subject. The precise amount, number of doses, and timing of doses will be determined by the attending physician or veterinarian.

[1471] Therapeutic compositions of the present invention can be administered to any animal, preferably to mammals and birds. Preferred mammals include humans, dogs, cats, mice, rats, rabbits sheep, cattle, horses and pigs, with humans being particularly preferred.

Biological Activities

[1472] Polynucleotides or polypeptides, or agonists or antagonists of the present invention, can be used in assays to test for one or more biological activities. If these polynucleotides or polypeptides, or agonists or antagonists of the present invention, do exhibit activity in a particular assay, it is likely that these molecules may be involved in the diseases associated with the biological activity. Thus, the polynucleotides and polypeptides, and agonists or antagonists could be used to treat the associated disease.

[1473] Members of the secreted family of proteins are believed to be involved in biological activities associated with, for example, cellular signaling. Accordingly, compositions of the invention (including polynucleotides, polypeptides and antibodies of the invention, and fragments and variants thereof) may be used in diagnosis, prognosis, prevention and/or treatment of diseases and/or disorders associated with aberrant activity of secreted polypeptides.

[1474] In preferred embodiments, compositions of the invention (including polynucleotides, polypeptides and antibodies of the invention, and fragments and variants thereof) may be used in the diagnosis, prognosis, prevention and/or treatment of diseases and/or disorders relating to diseases and disorders of the endocrine system, the nervous system (See, for example, “Neurological Disorders” section below), and the immune system (See, for example, “Immune Activity” section below).

[1475] In certain embodiments, a polypeptide of the invention, or polynucleotides, antibodies, agonists, or antagonists corresponding to that polypeptide, may be used to diagnose and/or prognose diseases and/or disorders associated with the tissue(s) in which the polypeptide of the invention is expressed including one, two, three, four, five, or more tissues disclosed in Table 1B, column 8 (Tissue Distribution Library Code).

[1476] Thus, polynucleotides, translation products and antibodies of the invention are useful in the diagnosis, detection and/or treatment of diseases and/or disorders associated with activities that include, but are not limited to, prohormone activation, neurotransmitter activity, cellular signaling, cellular proliferation, cellular differentiation, and cell migration.

[1477] More generally, polynucleotides, translation products and antibodies corresponding to this gene may be useful for the diagnosis, prognosis, prevention and/or treatment of diseases and/or disorders associated with the following systems.

Immune Activity

[1478] Polynucleotides, polypeptides, antibodies, and/or agonists or antagonists of the present invention may be useful in treating, preventing, diagnosing and/or prognosing diseases, disorders, and/or conditions of the immune system, by, for example, activating or inhibiting the proliferation, differentiation, or mobilization (chemotaxis) of immune cells. Immune cells develop through a process called hematopoiesis, producing myeloid (platelets, red blood cells, neutrophils, and macrophages) and lymphoid (B and T lymphocytes) cells from pluripotent stem cells. The etiology of these immune diseases, disorders, and/or conditions may be genetic, somatic, such as cancer and some autoimmune diseases, acquired (e.g., by chemotherapy or toxins), or infectious. Moreover, polynucleotides, polypeptides, antibodies, and/or agonists or antagonists of the present invention can be used as a marker or detector of a particular immune system disease or disorder.

[1479] In another embodiment, a polypeptide of the invention, or polynucleotides, antibodies, agonists, or antagonists corresponding to that polypeptide, may be used to treat diseases and disorders of the immune system and/or to inhibit or enhance an immune response generated by cells associated with the tissue(s) in which the polypeptide of the invention is expressed, including one, two, three, four, five, or more tissues disclosed in Table 1B, column 8 (Tissue Distribution Library Code).

[1480] Polynucleotides, polypeptides, antibodies, and/or agonists or antagonists of the present invention may be useful in treating, preventing, diagnosing, and/or prognosing immunodeficiencies, including both congenital and acquired immunodeficiencies. Examples of B cell immunodeficiencies in which immunoglobulin levels B cell function and/or B cell numbers are decreased include: X-linked agammaglobulinemia (Bruton's disease), X-linked infantile agammaglobulinemia, X-linked immunodeficiency with hyper IgM, non X-linked immunodeficiency with hyper IgM, X-linked lymphoproliferative syndrome (XLP), agammaglobulinemia including congenital and acquired agammaglobulinemia, adult onset agammaglobulinemia, late-onset agammaglobulinemia, dysgammaglobulinemia, hypogammaglobulinemia, unspecified hypogammaglobulinemia, recessive agammaglobulinemia (Swiss type), Selective IgM deficiency, selective IgA deficiency, selective IgG subclass deficiencies, IgG subclass deficiency (with or without IgA deficiency), Ig deficiency with increased IgM, IgG and IgA deficiency with increased IgM, antibody deficiency with normal or elevated Igs, Ig heavy chain deletions, kappa chain deficiency, B cell lymphoproliferative disorder (BLPD), common variable immunodeficiency (CVID), common variable immunodeficiency (CVI) (acquired), and transient hypogammaglobulinemia of infancy.

[1481] In specific embodiments, ataxia-telangiectasia or conditions associated with ataxia-telangiectasia are treated, prevented, diagnosed, and/or prognosing using the polypeptides or polynucleotides of the invention, and/or agonists or antagonists thereof.

[1482] Examples of congenital immunodeficiencies in which T cell and/or B cell function and/or number is decreased include, but are not limited to: DiGeorge anomaly, severe combined immunodeficiencies (SCID) (including, but not limited to, X-linked SCID, autosomal recessive SCID, adenosine deaminase deficiency, purine nucleoside phosphorylase (PNP) deficiency, Class II MHC deficiency (Bare lymphocyte syndrome), Wiskott-Aldrich syndrome, and ataxia telangiectasia), thymic hypoplasia, third and fourth pharyngeal pouch syndrome, 22q11.2 deletion, chronic mucocutaneous candidiasis, natural killer cell deficiency (NK), idiopathic CD4+ T-lymphocytopenia, immunodeficiency with predominant T cell defect (unspecified), and unspecified immunodeficiency of cell mediated immunity.

[1483] In specific embodiments, DiGeorge anomaly or conditions associated with DiGeorge anomaly are treated, prevented, diagnosed, and/or prognosed using polypeptides or polynucleotides of the invention, or antagonists or agonists thereof.

[1484] Other immunodeficiencies that may be treated, prevented, diagnosed, and/or prognosed using polypeptides or polynucleotides of the invention, and/or agonists or antagonists thereof, include, but are not limited to, chronic granulomatous disease, Chédiak-Higashi syndrome, myeloperoxidase deficiency, leukocyte glucose-6-phosphate dehydrogenase deficiency, X-linked lymphoproliferative syndrome (XLP), leukocyte adhesion deficiency, complement component deficiencies (including C1, C2, C3, C4, C5, C6, C7, C8 and/or C9 deficiencies), reticular dysgenesis, thymic alymphoplasia-aplasia, immunodeficiency with thymoma, severe congenital leukopenia, dysplasia with immunodeficiency, neonatal neutropenia, short limbed dwarfism, and Nezelof syndrome-combined immunodeficiency with Igs.

[1485] In a preferred embodiment, the immunodeficiencies and/or conditions associated with the immunodeficiencies recited above are treated, prevented, diagnosed and/or prognosed using polynucleotides, polypeptides, antibodies, and/or agonists or antagonists of the present invention.

[1486] In a preferred embodiment polynucleotides, polypeptides, antibodies, and/or agonists or antagonists of the present invention could be used as an agent to boost immunoresponsiveness among immunodeficient individuals. In specific embodiments, polynucleotides, polypeptides, antibodies, and/or agonists or antagonists of the present invention could be used as an agent to boost immunoresponsiveness among B cell and/or T cell immunodeficient individuals.

[1487] The polynucleotides, polypeptides, antibodies, and/or agonists or antagonists of the present invention may be useful in treating, preventing, diagnosing and/or prognosing autoimmune disorders. Many autoimmune disorders result from inappropriate recognition of self as foreign material by immune cells. This inappropriate recognition results in an immune response leading to the destruction of the host tissue. Therefore, the administration of polynucleotides and polypeptides of the invention that can inhibit an immune response, particularly the proliferation, differentiation, or chemotaxis of T-cells, may be an effective therapy in preventing autoimmune disorders.

[1488] Autoimmune diseases or disorders that may be treated, prevented, diagnosed and/or prognosed by polynucleotides, polypeptides, antibodies, and/or agonists or antagonists of the present invention include, but are not limited to, one or more of the following: systemic lupus erythematosus, rheumatoid arthritis, ankylosing spondylitis, multiple sclerosis, autoimmune thyroiditis, Hashimoto's thyroiditis, autoimmune hemolytic anemia, hemolytic anemia, thrombocytopenia, autoimmune thrombocytopenia purpura, autoimmune neonatal thrombocytopenia, idiopathic thrombocytopenia purpura, purpura (e.g., Henloch-Scoenlein purpura), autoimmunocytopenia, Goodpasture's syndrome, Pemphigus vulgaris, myasthenia gravis, Grave's disease (hyperthyroidism), and insulin-resistant diabetes mellitus.

[1489] Additional disorders that are likely to have an autoimmune component that may be treated, prevented, and/or diagnosed with the compositions of the invention include, but are not limited to, type II collagen-induced arthritis, antiphospholipid syndrome, dermatitis, allergic encephalomyelitis, myocarditis, relapsing polychondritis, rheumatic heart disease, neuritis, uveitis ophthalmia, polyendocrinopathies, Reiter's Disease, Stiff-Man Syndrome, autoimmune pulmonary inflammation, autism, Guillain-Barre Syndrome, insulin dependent diabetes mellitus, and autoimmune inflammatory eye disorders.

[1490] Additional disorders that are likely to have an autoimmune component that may be treated, prevented, diagnosed and/or prognosed with the compositions of the invention include, but are not limited to, scleroderma with anti-collagen antibodies (often characterized, e.g., by nucleolar and other nuclear antibodies), mixed connective tissue disease (often characterized, e.g., by antibodies to extractable nuclear antigens (e.g., ribonucleoprotein)), polymyositis (often characterized, e.g., by nonhistone ANA), pernicious anemia (often characterized, e.g., by antiparietal cell, microsomes, and intrinsic factor antibodies), idiopathic Addison's disease (often characterized, e.g., by humoral and cell-mediated adrenal cytotoxicity, infertility (often characterized, e.g., by antispermatozoal antibodies), glomerulonephritis (often characterized, e.g., by glomerular basement membrane antibodies or immune complexes), bullous pemphigoid (often characterized, e.g., by IgG and complement in basement membrane), Sjogren's syndrome (often characterized, e.g., by multiple tissue antibodies, and/or a specific nonhistone ANA (SS-B)), diabetes mellitus (often characterized, e.g., by cell-mediated and humoral islet cell antibodies), and adrenergic drug resistance (including adrenergic drug resistance with asthma or cystic fibrosis) (often characterized, e.g., by beta-adrenergic receptor antibodies).

[1491] Additional disorders that may have an autoimmune component that may be treated, prevented, diagnosed and/or prognosed with the compositions of the invention include, but are not limited to, chronic active hepatitis (often characterized, e.g., by smooth muscle antibodies), primary biliary cirrhosis (often characterized, e.g., by mitochondria antibodies), other endocrine gland failure (often characterized, e.g., by specific tissue antibodies in some cases), vitiligo (often characterized, e.g., by melanocyte antibodies), vasculitis (often characterized, e.g., by Ig and complement in vessel walls and/or low serum complement), post-MI (often characterized, e.g., by myocardial antibodies), cardiotomy syndrome (often characterized, e.g., by myocardial antibodies), urticaria (often characterized, e.g., by IgG and IgM antibodies to IgE), atopic dermatitis (often characterized, e.g., by IgG and IgM antibodies to IgE), asthma (often characterized, e.g., by IgG and IgM antibodies to IgE), and many other inflammatory, granulomatous, degenerative, and atrophic disorders.

[1492] In a preferred embodiment, the autoimmune diseases and disorders and/or conditions associated with the diseases and disorders recited above are treated, prevented, diagnosed and/or prognosed using for example, antagonists or agonists, polypeptides or polynucleotides, or antibodies of the present invention. In a specific preferred embodiment, rheumatoid arthritis is treated, prevented, and/or diagnosed using polynucleotides, polypeptides, antibodies, and/or agonists or antagonists of the present invention.

[1493] In another specific preferred embodiment, systemic lupus erythematosus is treated, prevented, and/or diagnosed using polynucleotides, polypeptides, antibodies, and/or agonists or antagonists of the present invention. In another specific preferred embodiment, idiopathic thrombocytopenia purpura is treated, prevented, and/or diagnosed using polynucleotides, polypeptides, antibodies, and/or agonists or antagonists of the present invention.

[1494] In another specific preferred embodiment IgA nephropathy is treated, prevented, and/or diagnosed using polynucleotides, polypeptides, antibodies, and/or agonists or antagonists of the present invention.

[1495] In a preferred embodiment, the autoimmune diseases and disorders and/or conditions associated with the diseases and disorders recited above are treated, prevented, diagnosed and/or prognosed using polynucleotides, polypeptides, antibodies, and/or agonists or antagonists of the present invention

[1496] In preferred embodiments, polypeptides, antibodies, polynucleotides and/or agonists or antagonists of the present invention are used as a immunosuppressive agent(s).

[1497] Polynucleotides, polypeptides, antibodies, and/or agonists or antagonists of the present invention may be useful in treating, preventing, prognosing, and/or diagnosing diseases, disorders, and/or conditions of hematopoietic cells. Polynucleotides, polypeptides, antibodies, and/or agonists or antagonists of the present invention could be used to increase differentiation and proliferation of hematopoietic cells, including the pluripotent stem cells, in an effort to treat or prevent those diseases, disorders, and/or conditions associated with a decrease in certain (or many) types hematopoietic cells, including but not limited to, leukopenia, neutropenia, anemia, and thrombocytopenia. Alternatively, Polynucleotides, polypeptides, antibodies, and/or agonists or antagonists of the present invention could be used to increase differentiation and proliferation of hematopoietic cells, including the pluripotent stem cells, in an effort to treat or prevent those diseases, disorders, and/or conditions associated with an increase in certain (or many) types of hematopoietic cells, including but not limited to, histiocytosis.

[1498] Allergic reactions and conditions, such as asthma (particularly allergic asthma) or other respiratory problems, may also be treated, prevented, diagnosed and/or prognosed using polypeptides, antibodies, or polynucleotides of the invention, and/or agonists or antagonists thereof. Moreover, these molecules can be used to treat, prevent, prognose, and/or diagnose anaphylaxis, hypersensitivity to an antigenic molecule, or blood group incompatibility.

[1499] Additionally, polypeptides or polynucleotides of the invention, and/or agonists or antagonists thereof, may be used to treat, prevent, diagnose and/or prognose IgE-mediated allergic reactions. Such allergic reactions include, but are not limited to, asthma, rhinitis, and eczema. In specific embodiments, polynucleotides, polypeptides, antibodies, and/or agonists or antagonists of the present invention may be used to modulate IgE concentrations in vitro or in vivo.

[1500] Moreover, polynucleotides, polypeptides, antibodies, and/or agonists or antagonists of the present invention have uses in the diagnosis, prognosis, prevention, and/or treatment of inflammatory conditions. For example, since polypeptides, antibodies, or polynucleotides of the invention, and/or agonists or antagonists of the invention may inhibit the activation, proliferation and/or differentiation of cells involved in an inflammatory response, these molecules can be used to prevent and/or treat chronic and acute inflammatory conditions. Such inflammatory conditions include, but are not limited to, for example, inflammation associated with infection (e.g., septic shock, sepsis, or systemic inflammatory response syndrome), ischemia-reperfusion injury, endotoxin lethality, complement-mediated hyperacute rejection, nephritis, cytokine or chemokine induced lung injury, inflammatory bowel disease, Crohn's disease, over production of cytokines (e.g., TNF or IL-1.), respiratory disorders (e.g., asthma and allergy); gastrointestinal disorders (e.g., inflammatory bowel disease); cancers (e.g., gastric, ovarian, lung, bladder, liver, and breast); CNS disorders (e.g., multiple sclerosis; ischemic brain injury and/or stroke, traumatic brain injury, neurodegenerative disorders (e.g., Parkinson's disease and Alzheimer's disease); AIDS-related dementia; and prion disease); cardiovascular disorders (e.g., atherosclerosis, myocarditis, cardiovascular disease, and cardiopulmonary bypass complications); as well as many additional diseases, conditions, and disorders that are characterized by inflammation (e.g., hepatitis, rheumatoid arthritis, gout, trauma, pancreatitis, sarcoidosis, dermatitis, renal ischemia-reperfusion injury, Grave's disease, systemic lupus erythematosus, diabetes mellitus, and allogenic transplant rejection).

[1501] Because inflammation is a fundamental defense mechanism, inflammatory disorders can effect virtually any tissue of the body. Accordingly, polynucleotides, polypeptides, and antibodies of the invention, as well as agonists or antagonists thereof, have uses in the treatment of tissue-specific inflammatory disorders, including, but not limited to, adrenalitis, alveolitis, angiocholecystitis, appendicitis, balanitis, blepharitis, bronchitis, bursitis, carditis, cellulitis, cervicitis, cholecystitis, chorditis, cochlitis, colitis, conjunctivitis, cystitis, dermatitis, diverticulitis, encephalitis, endocarditis, esophagitis, eustachitis, fibrositis, folliculitis, gastritis, gastroenteritis, gingivitis, glossitis, hepatosplenitis, keratitis, labyrinthitis, laryngitis, lymphangitis, mastitis, media otitis, meningitis, metritis, mucitis, myocarditis, myosititis, myringitis, nephritis, neuritis, orchitis, osteochondritis, otitis, pericarditis, peritendonitis, peritonitis, pharyngitis, phlebitis, poliomyelitis, prostatitis, pulpitis, retinitis, rhinitis, salpingitis, scleritis, sclerochoroiditis, scrotitis, sinusitis, spondylitis, steatitis, stomatitis, synovitis, syringitis, tendonitis, tonsillitis, urethritis, and vaginitis.

[1502] In specific embodiments, polypeptides, antibodies, or polynucleotides of the invention, and/or agonists or antagonists thereof, are useful to diagnose, prognose, prevent, and/or treat organ transplant rejections and graft-versus-host disease. Organ rejection occurs by host immune cell destruction of the transplanted tissue through an immune response. Similarly, an immune response is also involved in GVHD, but, in this case, the foreign transplanted immune cells destroy the host tissues. Polypeptides, antibodies, or polynucleotides of the invention, and/or agonists or antagonists thereof, that inhibit an immune response, particularly the activation, proliferation, differentiation, or chemotaxis of T-cells, may be an effective therapy in preventing organ rejection or GVHD. In specific embodiments, polypeptides, antibodies, or polynucleotides of the invention, and/or agonists or antagonists thereof, that inhibit an immune response, particularly the activation, proliferation, differentiation, or chemotaxis of T-cells, may be an effective therapy in preventing experimental allergic and hyperacute xenograft rejection.

[1503] In other embodiments, polypeptides, antibodies, or polynucleotides of the invention, and/or agonists or antagonists thereof, are useful to diagnose, prognose, prevent, and/or treat immune complex diseases, including, but not limited to, serum sickness, post streptococcal glomerulonephritis, polyarteritis nodosa, and immune complex-induced vasculitis.

[1504] Polypeptides, antibodies, polynucleotides and/or agonists or antagonists of the invention can be used to treat, detect, and/or prevent infectious agents. For example, by increasing the immune response, particularly increasing the proliferation activation and/or differentiation of B and/or T cells, infectious diseases may be treated, detected, and/or prevented. The immune response may be increased by either enhancing an existing immune response, or by initiating a new immune response. Alternatively, polynucleotides, polypeptides, antibodies, and/or agonists or antagonists of the present invention may also directly inhibit the infectious agent (refer to section of application listing infectious agents, etc), without necessarily eliciting an immune response.

[1505] In another embodiment, polypeptides, antibodies, polynucleotides and/or agonists or antagonists of the present invention are used as a vaccine adjuvant that enhances immune responsiveness to an antigen. In a specific embodiment, polypeptides, antibodies, polynucleotides and/or agonists or antagonists of the present invention are used as an adjuvant to enhance tumor-specific immune responses.

[1506] In another specific embodiment, polypeptides, antibodies, polynucleotides and/or agonists or antagonists of the present invention are used as an adjuvant to enhance anti-viral immune responses. Anti-viral immune responses that may be enhanced using the compositions of the invention as an adjuvant, include virus and virus associated diseases or symptoms described herein or otherwise known in the art. In specific embodiments, the compositions of the invention are used as an adjuvant to enhance an immune response to a virus, disease, or symptom selected from the group consisting of: AIDS, meningitis, Dengue, EBV, and hepatitis (e.g., hepatitis B). In another specific embodiment, the compositions of the invention are used as an adjuvant to enhance an immune response to a virus, disease, or symptom selected from the group consisting of: HIV/AIDS, respiratory syncytial virus, Dengue, rotavirus, Japanese B encephalitis, influenza A and B, parainfluenza, measles, cytomegalovirus, rabies, Junin, Chikungunya, Rift Valley Fever, herpes simplex, and yellow fever.

[1507] In another specific embodiment, polypeptides, antibodies, polynucleotides and/or agonists or antagonists of the present invention are used as an adjuvant to enhance anti-bacterial or anti-fungal immune responses. Anti-bacterial or anti-fungal immune responses that may be enhanced using the compositions of the invention as an adjuvant, include bacteria or fungus and bacteria or fungus associated diseases or symptoms described herein or otherwise known in the art. In specific embodiments, the compositions of the invention are used as an adjuvant to enhance an immune response to a bacteria or fungus, disease, or symptom selected from the group consisting of: tetanus, Diphtheria, botulism, and meningitis type B.

[1508] In another specific embodiment, the compositions of the invention are used as an adjuvant to enhance an immune response to a bacteria or fungus, disease, or symptom selected from the group consisting of: Vibrio cholerae, Mycobacterium leprae, Salmonella typhi, Salmonella paratyphi, Meisseria meningitidis, Streptococcus pneumoniae, Group B streptococcus, Shigella spp., Enterotoxigenic Escherichia coli, Enterohemorrhagic E. coli, and Borrelia burgdorferi.

[1509] In another specific embodiment, polypeptides, antibodies, polynucleotides and/or agonists or antagonists of the present invention are used as an adjuvant to enhance anti-parasitic immune responses. Anti-parasitic immune responses that may be enhanced using the compositions of the invention as an adjuvant, include parasite and parasite associated diseases or symptoms described herein or otherwise known in the art. In specific embodiments, the compositions of the invention are used as an adjuvant to enhance an immune response to a parasite. In another specific embodiment, the compositions of the invention are used as an adjuvant to enhance an immune response to Plasmodium (malaria) or Leishmania.

[1510] In another specific embodiment, polypeptides, antibodies, polynucleotides and/or agonists or antagonists of the present invention may also be employed to treat infectious diseases including silicosis, sarcoidosis, and idiopathic pulmonary fibrosis; for example, by preventing the recruitment and activation of mononuclear phagocytes.

[1511] In another specific embodiment, polypeptides, antibodies, polynucleotides and/or agonists or antagonists of the present invention are used as an antigen for the generation of antibodies to inhibit or enhance immune mediated responses against polypeptides of the invention.

[1512] In one embodiment, polypeptides, antibodies, polynucleotides and/or agonists or antagonists of the present invention are administered to an animal (e.g., mouse, rat, rabbit, hamster, guinea pig, pigs, micro-pig, chicken, camel, goat, horse, cow, sheep, dog, cat, non-human primate, and human, most preferably human) to boost the immune system to produce increased quantities of one or more antibodies (e.g., IgG, IgA, IgM, and IgE), to induce higher affinity antibody production and immunoglobulin class switching (e.g., IgG, IgA, IgM, and IgE), and/or to increase an immune response.

[1513] In another specific embodiment, polypeptides, antibodies, polynucleotides and/or agonists or antagonists of the present invention are used as a stimulator of B cell responsiveness to pathogens.

[1514] In another specific embodiment, polypeptides, antibodies, polynucleotides and/or agonists or antagonists of the present invention are used as an activator of T cells.

[1515] In another specific embodiment, polypeptides, antibodies, polynucleotides and/or agonists or antagonists of the present invention are used as an agent that elevates the immune status of an individual prior to their receipt of immunosuppressive therapies.

[1516] In another specific embodiment, polypeptides, antibodies, polynucleotides and/or agonists or antagonists of the present invention are used as an agent to induce higher affinity antibodies.

[1517] In another specific embodiment, polypeptides, antibodies, polynucleotides and/or agonists or antagonists of the present invention are used as an agent to increase serum immunoglobulin concentrations.

[1518] In another specific embodiment, polypeptides, antibodies, polynucleotides and/or agonists or antagonists of the present invention are used as an agent to accelerate recovery of immunocompromised individuals.

[1519] In another specific embodiment, polypeptides, antibodies, polynucleotides and/or agonists or antagonists of the present invention are used as an agent to boost immunoresponsiveness among aged populations and/or neonates.

[1520] In another specific embodiment, polypeptides, antibodies, polynucleotides and/or agonists or antagonists of the present invention are used as an immune system enhancer prior to, during, or after bone marrow transplant and/or other transplants (e.g., allogeneic or xenogeneic organ transplantation). With respect to transplantation, compositions of the invention may be administered prior to, concomitant with, and/or after transplantation. In a specific embodiment, compositions of the invention are administered after transplantation, prior to the beginning of recovery of T-cell populations. In another specific embodiment, compositions of the invention are first administered after transplantation after the beginning of recovery of T cell populations, but prior to full recovery of B cell populations.

[1521] In another specific embodiment, polypeptides, antibodies, polynucleotides and/or agonists or antagonists of the present invention are used as an agent to boost immunoresponsiveness among individuals having an acquired loss of B cell function. Conditions resulting in an acquired loss of B cell function that may be ameliorated or treated by administering the polypeptides, antibodies, polynucleotides and/or agonists or antagonists thereof, include, but are not limited to, HIV Infection, AIDS, bone marrow transplant, and B cell chronic lymphocytic leukemia (CLL).

[1522] In another specific embodiment, polypeptides, antibodies, polynucleotides and/or agonists or antagonists of the present invention are used as an agent to boost immunoresponsiveness among individuals having a temporary immune deficiency. Conditions resulting in a temporary immune deficiency that may be ameliorated or treated by administering the polypeptides, antibodies, polynucleotides and/or agonists or antagonists thereof, include, but are not limited to, recovery from viral infections (e.g., influenza), conditions associated with malnutrition, recovery from infectious mononucleosis, or conditions associated with stress, recovery from measles, recovery from blood transfusion, and recovery from surgery.

[1523] In another specific embodiment, polypeptides, antibodies, polynucleotides and/or agonists or antagonists of the present invention are used as a regulator of antigen presentation by monocytes, dendritic cells, and/or B-cells. In one embodiment, polynucleotides, polypeptides, antibodies, and/or agonists or antagonists of the present invention enhance antigen presentation or antagonizes antigen presentation in vitro or in vivo. Moreover, in related embodiments, said enhancement or antagonism of antigen presentation may be useful as an anti-tumor treatment or to modulate the immune system.

[1524] In another specific embodiment, polypeptides, antibodies, polynucleotides and/or agonists or antagonists of the present invention are used as an agent to direct an individual's immune system towards development of a humoral response (i.e. TH2) as opposed to a TH1 cellular response.

[1525] In another specific embodiment, polypeptides, antibodies, polynucleotides and/or agonists or antagonists of the present invention are used as a means to induce tumor proliferation and thus make it more susceptible to anti-neoplastic agents. For example, multiple myeloma is a slowly dividing disease and is thus refractory to virtually all anti-neoplastic regimens. If these cells were forced to proliferate more rapidly their susceptibility profile would likely change.

[1526] In another specific embodiment, polypeptides, antibodies, polynucleotides and/or agonists or antagonists of the present invention are used as a stimulator of B cell production in pathologies such as AIDS, chronic lymphocyte disorder and/or Common Variable Immunodificiency.

[1527] In another specific embodiment, polypeptides, antibodies, polynucleotides and/or agonists or antagonists of the present invention are used as a therapy for generation and/or regeneration of lymphoid tissues following surgery, trauma or genetic defect. In another specific embodiment, polypeptides, antibodies, polynucleotides and/or agonists or antagonists of the present invention are used in the pretreatment of bone marrow samples prior to transplant.

[1528] In another specific embodiment, polypeptides, antibodies, polynucleotides and/or agonists or antagonists of the present invention are used as a gene-based therapy for genetically inherited disorders resulting in immuno-incompetence/immunodeficiency such as observed among SCID patients.

[1529] In another specific embodiment, polypeptides, antibodies, polynucleotides and/or agonists or antagonists of the present invention are used as a means of activating monocytes/macrophages to defend against parasitic diseases that effect monocytes such as Leishmania.

[1530] In another specific embodiment, polypeptides, antibodies, polynucleotides and/or agonists or antagonists of the present invention are used as a means of regulating secreted cytokines that are elicited by polypeptides of the invention.

[1531] In another embodiment, polypeptides, antibodies, polynucleotides and/or agonists or antagonists of the present invention are used in one or more of the applications decribed herein, as they may apply to veterinary medicine.

[1532] In another specific embodiment, polypeptides, antibodies, polynucleotides and/or agonists or antagonists of the present invention are used as a means of blocking various aspects of immune responses to foreign agents or self. Examples of diseases or conditions in which blocking of certain aspects of immune responses may be desired include autoimmune disorders such as lupus, and arthritis, as well as immunoresponsiveness to skin allergies, inflammation, bowel disease, injury and diseases/disorders associated with pathogens.

[1533] In another specific embodiment, polypeptides, antibodies, polynucleotides and/or agonists or antagonists of the present invention are used as a therapy for preventing the B cell proliferation and Ig secretion associated with autoimmune diseases such as idiopathic thrombocytopenic purpura, systemic lupus erythematosus and multiple sclerosis.

[1534] In another specific embodiment, polypeptides, antibodies, polynucleotides and/or agonists or antagonists of the present invention are used as a inhibitor of B and/or T cell migration in endothelial cells. This activity disrupts tissue architecture or cognate responses and is useful, for example in disrupting immune responses, and blocking sepsis.

[1535] In another specific embodiment, polypeptides, antibodies, polynucleotides and/or agonists or antagonists of the present invention are used as a therapy for chronic hypergammaglobulinemia evident in such diseases as monoclonal gammopathy of undetermined significance (MGUS), Waldenstrom's disease, related idiopathic monoclonal gammopathies, and plasmacytomas.

[1536] In another specific embodiment, polypeptides, antibodies, polynucleotides and/or agonists or antagonists of the present invention may be employed for instance to inhibit polypeptide chemotaxis and activation of macrophages and their precursors, and of neutrophils, basophils, B lymphocytes and some T-cell subsets, e.g., activated and CD8 cytotoxic T cells and natural killer cells, in certain autoimmune and chronic inflammatory and infective diseases. Examples of autoimmune diseases are described herein and include multiple sclerosis, and insulin-dependent diabetes.

[1537] The polypeptides, antibodies, polynucleotides and/or agonists or antagonists of the present invention may also be employed to treat idiopathic hyper-eosinophilic syndrome by, for example, preventing eosinophil production and migration.

[1538] In another specific embodiment, polypeptides, antibodies, polynucleotides and/or agonists or antagonists of the present invention are used to enhance or inhibit complement mediated cell lysis.

[1539] In another specific embodiment, polypeptides, antibodies, polynucleotides and/or agonists or antagonists of the present invention are used to enhance or inhibit antibody dependent cellular cytotoxicity.

[1540] In another specific embodiment, polypeptides, antibodies, polynucleotides and/or agonists or antagonists of the present invention may also be employed for treating atherosclerosis, for example, by preventing monocyte infiltration in the artery wall.

[1541] In another specific embodiment, polypeptides, antibodies, polynucleotides and/or agonists or antagonists of the present invention may be employed to treat adult respiratory distress syndrome (ARDS).

[1542] In another specific embodiment, polypeptides, antibodies, polynucleotides and/or agonists or antagonists of the present invention may be useful for stimulating wound and tissue repair, stimulating angiogenesis, and/or stimulating the repair of vascular or lymphatic diseases or disorders. Additionally, agonists and antagonists of the invention may be used to stimulate the regeneration of mucosal surfaces.

[1543] In a specific embodiment, polynucleotides or polypeptides, and/or agonists thereof are used to diagnose, prognose, treat, and/or prevent a disorder characterized by primary or acquired immunodeficiency, deficient serum immunoglobulin production, recurrent infections, and/or immune system dysfunction. Moreover, polynucleotides or polypeptides, and/or agonists thereof may be used to treat or prevent infections of the joints, bones, skin, and/or parotid glands, blood-borne infections (e.g., sepsis, meningitis, septic arthritis, and/or osteomyelitis), autoimmune diseases (e.g., those disclosed herein), inflammatory disorders, and malignancies, and/or any disease or disorder or condition associated with these infections, diseases, disorders and/or malignancies) including, but not limited to, CVID, other primary immune deficiencies, HIV disease, CLL, recurrent bronchitis, sinusitis, otitis media, conjunctivitis, pneumonia, hepatitis, meningitis, herpes zoster (e.g., severe herpes zoster), and/or pneumocystis carnii. Other diseases and disorders that may be prevented, diagnosed, prognosed, and/or treated with polynucleotides or polypeptides, and/or agonists of the present invention include, but are not limited to, HIV infection, HTLV-BLV infection, lymphopenia, phagocyte bactericidal dysfunction anemia, thrombocytopenia, and hemoglobinuria.

[1544] In another embodiment, polynucleotides, polypeptides, antibodies, and/or agonists or antagonists of the present invention are used to treat, and/or diagnose an individual having common variable immunodeficiency disease (“CVID”; also known as “acquired agammaglobulinemia” and “acquired hypogammaglobulinemia”) or a subset of this disease.

[1545] In a specific embodiment, polynucleotides, polypeptides, antibodies, and/or agonists or antagonists of the present invention may be used to diagnose, prognose, prevent, and/or treat cancers or neoplasms including immune cell or immune tissue-related cancers or neoplasms. Examples of cancers or neoplasms that may be prevented, diagnosed, or treated by polynucleotides, polypeptides, antibodies, and/or agonists or antagonists of the present invention include, but are not limited to, acute myelogenous leukemia, chronic myelogenous leukemia, Hodgkin's disease, non-Hodgkin's lymphoma, acute lymphocytic anemia (ALL) Chronic lymphocyte leukemia, plasmacytomas, multiple myeloma, Burkitt's lymphoma, EBV-transformed diseases, and/or diseases and disorders described in the section entitled “Hyperproliferative Disorders” elsewhere herein.

[1546] In another specific embodiment, polypeptides, antibodies, polynucleotides and/or agonists or antagonists of the present invention are used as a therapy for decreasing cellular proliferation of Large B-cell Lymphomas.

[1547] In another specific embodiment, polypeptides, antibodies, polynucleotides and/or agonists or antagonists of the present invention are used as a means of decreasing the involvement of B cells and Ig associated with Chronic Myelogenous Leukemia.

[1548] In specific embodiments, the compositions of the invention are used as an agent to boost immunoresponsiveness among B cell immunodeficient individuals, such as, for example, an individual who has undergone a partial or complete splenectomy.

[1549] Antagonists of the invention include, for example, binding and/or inhibitory antibodies, antisense nucleic acids, ribozymes or soluble forms of the polypeptides of the present invention (e.g., Fc fusion protein; see, e.g., Example 9). Agonists of the invention include, for example, binding or stimulatory antibodies, and soluble forms of the polypeptides (e.g., Fc fusion proteins; see, e.g., Example 9). polypeptides, antibodies, polynucleotides and/or agonists or antagonists of the present invention may be employed in a composition with a pharmaceutically acceptable carrier, e.g., as described herein.

[1550] In another embodiment, polypeptides, antibodies, polynucleotides and/or agonists or antagonists of the present invention are administered to an animal (including, but not limited to, those listed above, and also including transgenic animals) incapable of producing functional endogenous antibody molecules or having an otherwise compromised endogenous immune system, but which is capable of producing human immunoglobulin molecules by means of a reconstituted or partially reconstituted immune system from another animal (see, e.g., published PCT Application Nos. WO98/24893, WO/9634096, WO/9633735, and WO/9110741). Administration of polypeptides, antibodies, polynucleotides and/or agonists or antagonists of the present invention to such animals is useful for the generation of monoclonal antibodies against the polypeptides, antibodies, polynucleotides and/or agonists or antagonists of the present invention.

Blood-Related Disorders

[1551] The polynucleotides, polypeptides, antibodies, and/or agonists or antagonists of the present invention may be used to modulate hemostatic (the stopping of bleeding) or thrombolytic (clot dissolving) activity. For example, by increasing hemostatic or thrombolytic activity, polynucleotides or polypeptides, and/or agonists or antagonists of the present invention could be used to treat or prevent blood coagulation diseases, disorders, and/or conditions (e.g., afibrinogenemia, factor deficiencies, hemophilia), blood platelet diseases, disorders, and/or conditions (e.g., thrombocytopenia), or wounds resulting from trauma, surgery, or other causes. Alternatively, polynucleotides, polypeptides, antibodies, and/or agonists or antagonists of the present invention that can decrease hemostatic or thrombolytic activity could be used to inhibit or dissolve clotting. These molecules could be important in the treatment or prevention of heart attacks (infarction), strokes, or scarring. In specific embodiments, the polynucleotides, polypeptides, antibodies, and/or agonists or antagonists of the present invention may be used to prevent, diagnose, prognose, and/or treat thrombosis, arterial thrombosis, venous thrombosis, thromboembolism, pulmonary embolism, atherosclerosis, myocardial infarction, transient ischemic attack, unstable angina. In specific embodiments, the polynucleotides, polypeptides, antibodies, and/or agonists or antagonists of the present invention may be used for the prevention of occulsion of saphenous grafts, for reducing the risk of periprocedural thrombosis as might accompany angioplasty procedures, for reducing the risk of stroke in patients with atrial fibrillation including nonrheumatic atrial fibrillation, for reducing the risk of embolism associated with mechanical heart valves and or mitral valves disease. Other uses for the polynucleotides, polypeptides, antibodies, and/or agonists or antagonists of the present invention, include, but are not limited to, the prevention of occlusions in extrcorporeal devices (e.g., intravascular canulas, vascular access shunts in hemodialysis patients, hemodialysis machines, and cardiopulmonary bypass machines).

[1552] In another embodiment, a polypeptide of the invention, or polynucleotides, antibodies, agonists, or antagonists corresponding to that polypeptide, may be used to prevent, diagnose, prognose, and/or treat diseases and disorders of the blood and/or blood forming organs associated with the tissue(s) in which the polypeptide of the invention is expressed, including one, two, three, four, five, or more tissues disclosed in Table 1B, column 8 (Tissue Distribution Library Code).

[1553] The polynucleotides, polypeptides, antibodies, and/or agonists or antagonists of the present invention may be used to modulate hematopoietic activity (the formation of blood cells). For example, the polynucleotides, polypeptides, antibodies, and/or agonists or antagonists of the present invention may be used to increase the quantity of all or subsets of blood cells, such as, for example, erythrocytes, lymphocytes (B or T cells), myeloid cells (e.g., basophils, eosinophils, neutrophils, mast cells, macrophages) and platelets. The ability to decrease the quantity of blood cells or subsets of blood cells may be useful in the prevention, detection, diagnosis and/or treatment of anemias and leukopenias described below. Alternatively, the polynucleotides, polypeptides, antibodies, and/or agonists or antagonists of the present invention may be used to decrease the quantity of all or subsets of blood cells, such as, for example, erythrocytes, lymphocytes (B or T cells), myeloid cells (e.g., basophils, eosinophils, neutrophils, mast cells, macrophages) and platelets. The ability to decrease the quantity of blood cells or subsets of blood cells may be useful in the prevention, detection, diagnosis and/or treatment of leukocytoses, such as, for example eosinophilia.

[1554] The polynucleotides, polypeptides, antibodies, and/or agonists or antagonists of the present invention may be used to prevent, treat, or diagnose blood dyscrasia.

[1555] Anemias are conditions in which the number of red blood cells or amount of hemoglobin (the protein that carries oxygen) in them is below normal. Anemia may be caused by excessive bleeding, decreased red blood cell production, or increased red blood cell destruction (hemolysis). The polynucleotides, polypeptides, antibodies, and/or agonists or antagonists of the present invention may be useful in treating, preventing, and/or diagnosing anemias. Anemias that may be treated prevented or diagnosed by the polynucleotides, polypeptides, antibodies, and/or agonists or antagonists of the present invention include iron deficiency anemia, hypochromic anemia, microcytic anemia, chlorosis, hereditary siderob;astic anemia, idiopathic acquired sideroblastic anemia, red cell aplasia, megaloblastic anemia (e.g., pernicious anemia, (vitamin B12 deficiency) and folic acid deficiency anemia), aplastic anemia, hemolytic anemias (e.g., autoimmune helolytic anemia, microangiopathic hemolytic anemia, and paroxysmal nocturnal hemoglobinuria). The polynucleotides, polypeptides, antibodies, and/or agonists or antagonists of the present invention may be useful in treating, preventing, and/or diagnosing anemias associated with diseases including but not limited to, anemias associated with systemic lupus erythematosus, cancers, lymphomas, chronic renal disease, and enlarged spleens. The polynucleotides, polypeptides, antibodies, and/or agonists or antagonists of the present invention may be useful in treating, preventing, and/or diagnosing anemias arising from drug treatments such as anemias associated with methyldopa, dapsone, and/or sulfadrugs. Additionally, rhe polynucleotides, polypeptides, antibodies, and/or agonists or antagonists of the present invention may be useful in treating, preventing, and/or diagnosing anemias associated with abnormal red blood cell architecture including but not limited to, hereditary spherocytosis, hereditary elliptocytosis, glucose-6-phosphate dehydrogenase deficiency, and sickle cell anemia.

[1556] The polynucleotides, polypeptides, antibodies, and/or agonists or antagonists of the present invention may be useful in treating, preventing, and/or diagnosing hemoglobin abnormalities, (e.g., those associated with sickle cell anemia, hemoglobin C disease, hemoglobin S-C disease, and hemoglobin E disease). Additionally, the polynucleotides, polypeptides, antibodies, and/or agonists or antagonists of the present invention may be useful in diagnosing, prognosing, preventing, and/or treating thalassemias, including, but not limited to major and minor forms of alpha-thalassemia and beta-thalassemia.

[1557] In another embodiment, the polynucleotides, polypeptides, antibodies, and/or agonists or antagonists of the present invention may be useful in diagnosing, prognosing, preventing, and/or treating bleeding disorders including, but not limited to, thrombocytopenia (e.g., idiopathic thrombocytopenic purpura, and thrombotic thrombocytopenic purpura), Von Willebrand's disease, hereditary platelet disorders (e.g., storage pool disease such as Chediak-Higashi and Hermansky-Pudlak syndromes, thromboxane A2 dysfunction, thromboasthenia, and Bernard-Soulier syndrome), hemolytic-uremic syndrome, hemophelias such as hemophelia A or Factor VII deficiency and Christmas disease or Factor IX deficiency, Hereditary Hemorhhagic Telangiectsia, also known as Rendu-Osler-Weber syndrome, allergic purpura (Henoch Schonlein purpura) and disseminated intravascular coagulation.

[1558] The effect of the polynucleotides, polypeptides, antibodies, and/or agonists or antagonists of the present invention on the clotting time of blood may be monitored using any of the clotting tests known in the art including, but not limited to, whole blood partial thromboplastin time (PTT), the activated partial thromboplastin time (aPTT), the activated clotting time (ACT), the recalcified activated clotting time, or the Lee-White Clotting time. Several diseases and a variety of drugs can cause platelet dysfunction. Thus, in a specific embodiment, the polynucleotides, polypeptides, antibodies, and/or agonists or antagonists of the present invention may be useful in diagnosing, prognosing, preventing, and/or treating acquired platelet dysfunction such as platelet dysfunction accompanying kidney failure, leukemia, multiple myeloma, cirrhosis of the liver, and systemic lupus erythematosus as well as platelet dysfunction associated with drug treatments, including treatment with aspirin, ticlopidine, nonsteroidal anti-inflammatory drugs (used for arthritis, pain, and sprains), and penicillin in high doses.

[1559] In another embodiment, the polynucleotides, polypeptides, antibodies, and/or agonists or antagonists of the present invention may be useful in diagnosing, prognosing, preventing, and/or treating diseases and disorders characterized by or associated with increased or decreased numbers of white blood cells. Leukopenia occurs when the number of white blood cells decreases below normal. Leukopenias include, but are not limited to, neutropenia and lymphocytopenia. An increase in the number of white blood cells compared to normal is known as leukocytosis. The body generates increased numbers of white blood cells during infection. Thus, leukocytosis may simply be a normal physiological parameter that reflects infection. Alternatively, leukocytosis may be an indicator of injury or other disease such as cancer. Leokocytoses, include but are not limited to, eosinophilia, and accumulations of macrophages. In specific embodiments, the polynucleotides, polypeptides, antibodies, and/or agonists or antagonists of the present invention may be useful in diagnosing, prognosing, preventing, and/or treating leukopenia. In other specific embodiments, the polynucleotides, polypeptides, antibodies, and/or agonists or antagonists of the present invention may be useful in diagnosing, prognosing, preventing, and/or treating leukocytosis.

[1560] Leukopenia may be a generalized decreased in all types of white blood cells, or may be a specific depletion of particular types of white blood cells. Thus, in specific embodiments, the polynucleotides, polypeptides, antibodies, and/or agonists or antagonists of the present invention may be useful in diagnosing, prognosing, preventing, and/or treating decreases in neutrophil numbers, known as neutropenia. Neutropenias that may be diagnosed, prognosed, prevented, and/or treated by the polynucleotides, polypeptides, antibodies, and/or agonists or antagonists of the present invention include, but are not limited to, infantile genetic agranulocytosis, familial neutropenia, cyclic neutropenia, neutropenias resulting from or associated with dietary deficiencies (e.g., vitamin B 12 deficiency or folic acid deficiency), neutropenias resulting from or associated with drug treatments (e.g., antibiotic regimens such as penicillin treatment, sulfonamide treatment, anticoagulant treatment, anticonvulsant drugs, anti-thyroid drugs, and cancer chemotherapy), and neutropenias resulting from increased neutrophil destruction that may occur in association with some bacterial or viral infections, allergic disorders, autoimmune diseases, conditions in which an individual has an enlarged spleen (e.g., Felty syndrome, malaria and sarcoidosis), and some drug treatment regimens.

[1561] The polynucleotides, polypeptides, antibodies, and/or agonists or antagonists of the present invention may be useful in diagnosing, prognosing, preventing, and/or treating lymphocytopenias (decreased numbers of B and/or T lymphocytes), including, but not limited lymphocytopenias resulting from or associated with stress, drug treatments (e.g., drug treatment with corticosteroids, cancer chemotherapies, and/or radiation therapies), AIDS infection and/or other diseases such as, for example, cancer, rheumatoid arthritis, systemic lupus erythematosus, chronic infections, some viral infections and/or hereditary disorders (e.g., DiGeorge syndrome, Wiskott-Aldrich Syndome, severe combined immunodeficiency, ataxia telangiectsia).

[1562] The polynucleotides, polypeptides, antibodies, and/or agonists or antagonists of the present invention may be useful in diagnosing, prognosing, preventing, and/or treating diseases and disorders associated with macrophage numbers and/or macrophage function including, but not limited to, Gaucher's disease, Niemann-Pick disease, Letterer-Siwe disease and Hand-Schuller-Christian disease.

[1563] In another embodiment, the polynucleotides, polypeptides, antibodies, and/or agonists or antagonists of the present invention may be useful in diagnosing, prognosing, preventing, and/or treating diseases and disorders associated with eosinophil numbers and/or eosinophil function including, but not limited to, idiopathic hypereosinophilic syndrome, eosinophilia-myalgia syndrome, and Hand-Schuller-Christian disease.

[1564] In yet another embodiment, the polynucleotides, polypeptides, antibodies, and/or agonists or antagonists of the present invention may be useful in diagnosing, prognosing, preventing, and/or treating leukemias and lymphomas including, but not limited to, acute lymphocytic (lymphpblastic) leukemia (ALL), acute myeloid (myelocytic, myelogenous, myeloblastic, or myelomonocytic) leukemia, chronic lymphocytic leukemia (e.g., B cell leukemias, T cell leukemias, Sezary syndrome, and Hairy cell leukenia), chronic myelocytic (myeloid, myelogenous, or granulocytic) leukemia, Hodgkin's lymphoma, non-hodgkin's lymphoma, Burkitt's lymphoma, and mycosis fungoides.

[1565] In other embodiments, the polynucleotides, polypeptides, antibodies, and/or agonists or antagonists of the present invention may be useful in diagnosing, prognosing, preventing, and/or treating diseases and disorders of plasma cells including, but not limited to, plasma cell dyscrasias, monoclonal gammaopathies, monoclonal gammopathies of undetermined significance, multiple myeloma, macroglobulinemia, Waldenstrom's macroglobulinemia, cryoglobulinemia, and Raynaud's phenomenon.

[1566] In other embodiments, the polynucleotides, polypeptides, antibodies, and/or agonists or antagonists of the present invention may be useful in treating, preventing, and/or diagnosing myeloproliferative disorders, including but not limited to, polycythemia vera, relative polycythemia, secondary polycythemia, myelofibrosis, acute myelofibrosis, agnogenic myelod metaplasia, thrombocythemia, (including both primary and seconday thrombocythemia) and chronic myelocytic leukemia.

[1567] In other embodiments, the polynucleotides, polypeptides, antibodies, and/or agonists or antagonists of the present invention may be useful as a treatment prior to surgery, to increase blood cell production.

[1568] In other embodiments, the polynucleotides, polypeptides, antibodies, and/or agonists or antagonists of the present invention may be useful as an agent to enhance the migration, phagocytosis, superoxide production, antibody dependent cellular cytotoxicity of neutrophils, eosionophils and macrophages.

[1569] In other embodiments, the polynucleotides, polypeptides, antibodies, and/or agonists or antagonists of the present invention may be useful as an agent to increase the number of stem cells in circulation prior to stem cells pheresis. In another specific embodiment, the polynucleotides, polypeptides, antibodies, and/or agonists or antagonists of the present invention may be useful as an agent to increase the number of stem cells in circulation prior to platelet pheresis.

[1570] In other embodiments, the polynucleotides, polypeptides, antibodies, and/or agonists or antagonists of the present invention may be useful as an agent to increase cytokine production.

[1571] In other embodiments, the polynucleotides, polypeptides, antibodies, and/or agonists or antagonists of the present invention may be useful in preventing, diagnosing, and/or treating primary hematopoietic disorders.

Hyperproliferative Disorders

[1572] In certain embodiments, polynucleotides or polypeptides, or agonists or antagonists of the present invention can be used to treat or detect hyperproliferative disorders, including neoplasms. Polynucleotides or polypeptides, or agonists or antagonists of the present invention may inhibit the proliferation of the disorder through direct or indirect interactions. Alternatively, Polynucleotides or polypeptides, or agonists or antagonists of the present invention may proliferate other cells which can inhibit the hyperproliferative disorder.

[1573] For example, by increasing an immune response, particularly increasing antigenic qualities of the hyperproliferative disorder or by proliferating, differentiating, or mobilizing T-cells, hyperproliferative disorders can be treated. This immune response may be increased by either enhancing an existing immune response, or by initiating a new immune response. Alternatively, decreasing an immune response may also be a method of treating hyperproliferative disorders, such as a chemotherapeutic agent.

[1574] Examples of hyperproliferative disorders that can be treated or detected by polynucleotides or polypeptides, or agonists or antagonists of the present invention include, but are not limited to neoplasms located in the: colon, abdomen, bone, breast, digestive system, liver, pancreas, peritoneum, endocrine glands (adrenal, parathyroid, pituitary, testicles, ovary, thymus, thyroid), eye, head and neck, nervous (central and peripheral), lymphatic system, pelvis, skin, soft tissue, spleen, thorax, and urogenital tract.

[1575] Similarly, other hyperproliferative disorders can also be treated or detected by polynucleotides or polypeptides, or agonists or antagonists of the present invention. Examples of such hyperproliferative disorders include, but are not limited to: Acute Childhood Lymphoblastic Leukemia, Acute Lymphoblastic Leukemia, Acute Lymphocytic Leukemia, Acute Myeloid Leukemia, Adrenocortical Carcinoma, Adult (Primary) Hepatocellular Cancer, Adult (Primary) Liver Cancer, Adult Acute Lymphocytic Leukemia, Adult Acute Myeloid Leukemia, Adult Hodgkin's Disease, Adult Hodgkin's Lymphoma, Adult Lymphocytic Leukemia, Adult Non-Hodgkin's Lymphoma, Adult Primary Liver Cancer, Adult Soft Tissue Sarcoma, AIDS-Related Lymphoma, AIDS-Related Malignancies, Anal Cancer, Astrocytoma, Bile Duct Cancer, Bladder Cancer, Bone Cancer, Brain Stem Glioma, Brain Tumors, Breast Cancer, Cancer of the Renal Pelvis and Ureter, Central Nervous System (Primary) Lymphoma, Central Nervous System Lymphoma, Cerebellar Astrocytoma, Cerebral Astrocytoma, Cervical Cancer, Childhood (Primary) Hepatocellular Cancer, Childhood (Primary) Liver Cancer, Childhood Acute Lymphoblastic Leukemia, Childhood Acute Myeloid Leukemia, Childhood Brain Stem Glioma, Childhood Cerebellar Astrocytoma, Childhood Cerebral Astrocytoma, Childhood Extracranial Germ Cell Tumors, Childhood Hodgkin's Disease, Childhood Hodgkin's Lymphoma, Childhood Hypothalamic and Visual Pathway Glioma, Childhood Lymphoblastic Leukemia, Childhood Medulloblastoma, Childhood Non-Hodgkin's Lymphoma, Childhood Pineal and Supratentorial Primitive Neuroectodermal Tumors, Childhood Primary Liver Cancer, Childhood Rhabdomyosarcoma, Childhood Soft Tissue Sarcoma, Childhood Visual Pathway and Hypothalamic Glioma, Chronic Lymphocytic Leukemia, Chronic Myelogenous Leukemia, Colon Cancer, Cutaneous T-Cell Lymphoma, Endocrine Pancreas Islet Cell Carcinoma, Endometrial Cancer, Ependymoma, Epithelial Cancer, Esophageal Cancer, Ewing's Sarcoma and Related Tumors, Exocrine Pancreatic Cancer, Extracranial Germ Cell Tumor, Extragonadal Germ Cell Tumor, Extrahepatic Bile Duct Cancer, Eye Cancer, Female Breast Cancer, Gaucher's Disease, Gallbladder Cancer, Gastric Cancer, Gastrointestinal Carcinoid Tumor, Gastrointestinal Tumors, Germ Cell Tumors, Gestational Trophoblastic Tumor, Hairy Cell Leukemia, Head and Neck Cancer, Hepatocellular Cancer, Hodgkin's Disease, Hodgkin's Lymphoma, Hypergammaglobulinemia, Hypopharyngeal Cancer, Intestinal Cancers, Intraocular Melanoma, Islet Cell Carcinoma, Islet Cell Pancreatic Cancer, Kaposi's Sarcoma, Kidney Cancer, Laryngeal Cancer, Lip and Oral Cavity Cancer, Liver Cancer, Lung Cancer, Lymphoproliferative Disorders, Macroglobulinemia, Male Breast Cancer, Malignant Mesothelioma, Malignant Thymoma, Medulloblastoma, Melanoma, Mesothelioma, Metastatic Occult Primary Squamous Neck Cancer, Metastatic Primary Squamous Neck Cancer, Metastatic Squamous Neck Cancer, Multiple Myeloma, Multiple Myeloma/Plasma Cell Neoplasm, Myelodysplastic Syndrome, Myelogenous Leukemia, Myeloid Leukemia, Myeloproliferative Disorders, Nasal Cavity and Paranasal Sinus Cancer, Nasopharyngeal Cancer, Neuroblastoma, Non-Hodgkin's Lymphoma During Pregnancy, Nonmelanoma Skin Cancer, Non-Small Cell Lung Cancer, Occult Primary Metastatic Squamous Neck Cancer, Oropharyngeal Cancer, Osteo-/Malignant Fibrous Sarcoma, Osteosarcoma/Malignant Fibrous Histiocytoma, Osteosarcoma/Malignant Fibrous Histiocytoma of Bone, Ovarian Epithelial Cancer, Ovarian Germ Cell Tumor, Ovarian Low Malignant Potential Tumor, Pancreatic Cancer, Paraproteinemias, Purpura, Parathyroid Cancer, Penile Cancer, Pheochromocytoma, Pituitary Tumor, Plasma Cell Neoplasm/Multiple Myeloma, Primary Central Nervous System Lymphoma, Primary Liver Cancer, Prostate Cancer, Rectal Cancer, Renal Cell Cancer, Renal Pelvis and Ureter Cancer, Retinoblastoma, Rhabdomyosarcoma, Salivary Gland Cancer, Sarcoidosis Sarcomas, Sezary Syndrome, Skin Cancer, Small Cell Lung Cancer, Small Intestine Cancer, Soft Tissue Sarcoma, Squamous Neck Cancer, Stomach Cancer, Supratentorial Primitive Neuroectodermal and Pineal Tumors, T-Cell Lymphoma, Testicular Cancer, Thymoma, Thyroid Cancer, Transitional Cell Cancer of the Renal Pelvis and Ureter, Transitional Renal Pelvis and Ureter Cancer, Trophoblastic Tumors, Ureter and Renal Pelvis Cell Cancer, Urethral Cancer, Uterine Cancer, Uterine Sarcoma, Vaginal Cancer, Visual Pathway and Hypothalamic Glioma, Vulvar Cancer, Waldenstrom's Macroglobulinemia, Wilms' Tumor, and any other hyperproliferative disease, besides neoplasia, located in an organ system listed above.

[1576] In another preferred embodiment, polynucleotides or polypeptides, or agonists or antagonists of the present invention are used to diagnose, prognose, prevent, and/or treat premalignant conditions and to prevent progression to a neoplastic or malignant state, including but not limited to those disorders described above. Such uses are indicated in conditions known or suspected of preceding progression to neoplasia or cancer, in particular, where non-neoplastic cell growth consisting of hyperplasia, metaplasia, or most particularly, dysplasia has occurred (for review of such abnormal growth conditions, see Robbins and Angell, 1976, Basic Pathology, 2d Ed., W. B. Saunders Co., Philadelphia, pp. 68-79.)

[1577] Hyperplasia is a form of controlled cell proliferation, involving an increase in cell number in a tissue or organ, without significant alteration in structure or function. Hyperplastic disorders which can be diagnosed, prognosed, prevented, and/or treated with compositions of the invention (including polynucleotides, polypeptides, agonists or antagonists) include, but are not limited to, angiofollicular mediastinal lymph node hyperplasia, angiolymphoid hyperplasia with eosinophilia, atypical melanocytic hyperplasia, basal cell hyperplasia, benign giant lymph node hyperplasia, cementum hyperplasia, congenital adrenal hyperplasia, congenital sebaceous hyperplasia, cystic hyperplasia, cystic hyperplasia of the breast, denture hyperplasia, ductal hyperplasia, endometrial hyperplasia, fibromuscular hyperplasia, focal epithelial hyperplasia, gingival hyperplasia, inflammatory fibrous hyperplasia, inflammatory papillary hyperplasia, intravascular papillary endothelial hyperplasia, nodular hyperplasia of prostate, nodular regenerative hyperplasia, pseudoepitheliomatous hyperplasia, senile sebaceous hyperplasia, and verrucous hyperplasia.

[1578] Metaplasia is a form of controlled cell growth in which one type of adult or fully differentiated cell substitutes for another type of adult cell. Metaplastic disorders which can be diagnosed, prognosed, prevented, and/or treated with compositions of the invention (including polynucleotides, polypeptides, agonists or antagonists) include, but are not limited to, agnogenic myeloid metaplasia, apocrine metaplasia, atypical metaplasia, autoparenchymatous metaplasia, connective tissue metaplasia, epithelial metaplasia, intestinal metaplasia, metaplastic anemia, metaplastic ossification, metaplastic polyps, myeloid metaplasia, primary myeloid metaplasia, secondary myeloid metaplasia, squamous metaplasia, squamous metaplasia of amnion, and symptomatic myeloid metaplasia.

[1579] Dysplasia is frequently a forerunner of cancer, and is found mainly in the epithelia; it is the most disorderly form of non-neoplastic cell growth, involving a loss in individual cell uniformity and in the architectural orientation of cells. Dysplastic cells often have abnormally large, deeply stained nuclei, and exhibit pleomorphism. Dysplasia characteristically occurs where there exists chronic irritation or inflammation. Dysplastic disorders which can be diagnosed, prognosed, prevented, and/or treated with compositions of the invention (including polynucleotides, polypeptides, agonists or antagonists) include, but are not limited to, anhidrotic ectodermal dysplasia, anterofacial dysplasia, asphyxiating thoracic dysplasia, atriodigital dysplasia, bronchopulmonary dysplasia, cerebral dysplasia, cervical dysplasia, chondroectodermal dysplasia, cleidocranial dysplasia, congenital ectodermal dysplasia, craniodiaphysial dysplasia, craniocarpotarsal dysplasia, craniometaphysial dysplasia, dentin dysplasia, diaphysial dysplasia, ectodermal dysplasia, enamel dysplasia, encephalo-ophthalmic dysplasia, dysplasia epiphysialis hemimelia, dysplasia epiphysialis multiplex, dysplasia epiphysialis punctata, epithelial dysplasia, faciodigitogenital dysplasia, familial fibrous dysplasia of jaws, familial white folded dysplasia, fibromuscular dysplasia, fibrous dysplasia of bone, florid osseous dysplasia, hereditary renal-retinal dysplasia, hidrotic ectodermal dysplasia, hypohidrotic ectodermal dysplasia, lymphopenic thymic dysplasia, mammary dysplasia, mandibulofacial dysplasia, metaphysial dysplasia, Mondini dysplasia, monostotic fibrous dysplasia, mucoepithelial dysplasia, multiple epiphysial dysplasia, oculoauriculovertebral dysplasia, oculodentodigital dysplasia, oculovertebral dysplasia, odontogenic dysplasia, ophthalmomandibulomelic dysplasia, periapical cemental dysplasia, polyostotic fibrous dysplasia, pseudoachondroplastic spondyloepiphysial dysplasia, retinal dysplasia, septo-optic dysplasia, spondyloepiphysial dysplasia, and ventriculoradial dysplasia.

[1580] Additional pre-neoplastic disorders which can be diagnosed, prognosed, prevented, and/or treated with compositions of the invention (including polynucleotides, polypeptides, agonists or antagonists) include, but are not limited to, benign dysproliferative disorders (e.g., benign tumors, fibrocystic conditions, tissue hypertrophy, intestinal polyps, colon polyps, and esophageal dysplasia), leukoplakia, keratoses, Bowen's disease, Farmer's Skin, solar cheilitis, and solar keratosis.

[1581] In another embodiment, a polypeptide of the invention, or polynucleotides, antibodies, agonists, or antagonists corresponding to that polypeptide, may be used to diagnose and/or prognose disorders associated with the tissue(s) in which the polypeptide of the invention is expressed, including one, two, three, four, five, or more tissues disclosed in Table 1B, column 8 (Tissue Distribution Library Code).

[1582] In another embodiment, polynucleotides, polypeptides, antibodies, and/or agonists or antagonists of the present invention conjugated to a toxin or a radioactive isotope, as described herein, may be used to treat cancers and neoplasms, including, but not limited to those described herein. In a further preferred embodiment, polynucleotides, polypeptides, antibodies, and/or agonists or antagonists of the present invention conjugated to a toxin or a radioactive isotope, as described herein, may be used to treat acute myelogenous leukemia.

[1583] Additionally, polynucleotides, polypeptides, and/or agonists or antagonists of the invention may affect apoptosis, and therefore, would be useful in treating a number of diseases associated with increased cell survival or the inhibition of apoptosis. For example, diseases associated with increased cell survival or the inhibition of apoptosis that could be diagnosed, prognosed, prevented, and/or treated by polynucleotides, polypeptides, and/or agonists or antagonists of the invention, include cancers (such as follicular lymphomas, carcinomas with p53 mutations, and hormone-dependent tumors, including, but not limited to colon cancer, cardiac tumors, pancreatic cancer, melanoma, retinoblastoma, glioblastoma, lung cancer, intestinal cancer, testicular cancer, stomach cancer, neuroblastoma, myxoma, myoma, lymphoma, endothelioma, osteoblastoma, osteoclastoma, osteosarcoma, chondrosarcoma, adenoma, breast cancer, prostate cancer, Kaposi's sarcoma and ovarian cancer); autoimmune disorders such as, multiple sclerosis, Sjogren's syndrome, Hashimoto's thyroiditis, biliary cirrhosis, Behcet's disease, Crohn's disease, polymyositis, systemic lupus erythematosus and immune-related glomerulonephritis and rheumatoid arthritis) and viral infections (such as herpes viruses, pox viruses and adenoviruses), inflammation, graft v. host disease, acute graft rejection, and chronic graft rejection.

[1584] In preferred embodiments, polynucleotides, polypeptides, and/or agonists or antagonists of the invention are used to inhibit growth, progression, and/or metastasis of cancers, in particular those listed above.

[1585] Additional diseases or conditions associated with increased cell survival that could be diagnosed, prognosed, prevented, and/or treated by polynucleotides, polypeptides, and/or agonists or antagonists of the invention, include, but are not limited to, progression, and/or metastases of malignancies and related disorders such as leukemia (including acute leukemias (e.g., acute lymphocytic leukemia, acute myelocytic leukemia (including myeloblastic, promyelocytic, myelomonocytic, monocytic, and erythroleukemia)) and chronic leukemias (e.g., chronic myelocytic (granulocytic) leukemia and chronic lymphocytic leukemia)), polycythemia vera, lymphomas (e.g., Hodgkin's disease and non-Hodgkin's disease), multiple myeloma, Waldenstrom's macroglobulinemia, heavy chain disease, and solid tumors including, but not limited to, sarcomas and carcinomas such as fibrosarcoma, myxosarcoma, liposarcoma, chondrosarcoma, osteogenic sarcoma, chordoma, angiosarcoma, endotheliosarcoma, lymphangiosarcoma, lymphangioendotheliosarcoma, synovioma, mesothelioma, Ewing's tumor, leiomyosarcoma, rhabdomyosarcoma, colon carcinoma, pancreatic cancer, breast cancer, ovarian cancer, prostate cancer, squamous cell carcinoma, basal cell carcinoma, adenocarcinoma, sweat gland carcinoma, sebaceous gland carcinoma, papillary carcinoma, papillary adenocarcinomas, cystadenocarcinoma, medullary carcinoma, bronchogenic carcinoma, renal cell carcinoma, hepatoma, bile duct carcinoma, choriocarcinoma, seminoma, embryonal carcinoma, Wilm's tumor, cervical cancer, testicular tumor, lung carcinoma, small cell lung carcinoma, bladder carcinoma, epithelial carcinoma, glioma, astrocytoma, medulloblastoma, craniopharyngioma, ependymoma, pinealoma, emangioblastoma, acoustic neuroma, oligodendroglioma, menangioma, melanoma, neuroblastoma, and retinoblastoma.

[1586] Diseases associated with increased apoptosis that could be diagnosed, prognosed, prevented, and/or treated by polynucleotides, polypeptides, and/or agonists or antagonists of the invention, include AIDS; neurodegenerative disorders (such as Alzheimer's disease, Parkinson's disease, amyotrophic lateral sclerosis, retinitis pigmentosa, cerebellar degeneration and brain tumor or prior associated disease); autoimmune disorders (such as, multiple sclerosis, Sjogren's syndrome, Hashimoto's thyroiditis, biliary cirrhosis, Behcet's disease, Crohn's disease, polymyositis, systemic lupus erythematosus and immune-related glomerulonephritis and rheumatoid arthritis) myelodysplastic syndromes (such as aplastic anemia), graft v. host disease, ischemic injury (such as that caused by myocardial infarction, stroke and reperfusion injury), liver injury (e.g., hepatitis related liver injury, ischemia/reperfusion injury, cholestosis (bile duct injury) and liver cancer); toxin-induced liver disease (such as that caused by alcohol), septic shock, cachexia and anorexia.

[1587] Hyperproliferative diseases and/or disorders that could be diagnosed, prognosed, prevented, and/or treated by polynucleotides, polypeptides, and/or agonists or antagonists of the invention, include, but are not limited to, neoplasms located in the liver, abdomen, bone, breast, digestive system, pancreas, peritoneum, endocrine glands (adrenal, parathyroid, pituitary, testicles, ovary, thymus, thyroid), eye, head and neck, nervous system (central and peripheral), lymphatic system, pelvis, skin, soft tissue, spleen, thorax, and urogenital tract.

[1588] Similarly, other hyperproliferative disorders can also be diagnosed, prognosed, prevented, and/or treated by polynucleotides, polypeptides, and/or agonists or antagonists of the invention. Examples of such hyperproliferative disorders include, but are not limited to: hypergammaglobulinemia, lymphoproliferative disorders, paraproteinemias, purpura, sarcoidosis, Sezary Syndrome, Waldenstron's macroglobulinemia, Gaucher's Disease, histiocytosis, and any other hyperproliferative disease, besides neoplasia, located in an organ system listed above.

[1589] Another preferred embodiment utilizes polynucleotides of the present invention to inhibit aberrant cellular division, by gene therapy using the present invention, and/or protein fusions or fragments thereof.

[1590] Thus, the present invention provides a method for treating cell proliferative disorders by inserting into an abnormally proliferating cell a polynucleotide of the present invention, wherein said polynucleotide represses said expression.

[1591] Another embodiment of the present invention provides a method of treating cell-proliferative disorders in individuals comprising administration of one or more active gene copies of the present invention to an abnormally proliferating cell or cells. In a preferred embodiment, polynucleotides of the present invention is a DNA construct comprising a recombinant expression vector effective in expressing a DNA sequence encoding said polynucleotides. In another preferred embodiment of the present invention, the DNA construct encoding the poynucleotides of the present invention is inserted into cells to be treated utilizing a retrovirus, or more preferably an adenoviral vector (See G J. Nabel, et al., PNAS 1999 96: 324-326, which is hereby incorporated by reference). In a most preferred embodiment, the viral vector is defective and will not transform non-proliferating cells, only proliferating cells. Moreover, in a preferred embodiment, the polynucleotides of the present invention inserted into proliferating cells either alone, or in combination with or fused to other polynucleotides, can then be modulated via an external stimulus (i.e. magnetic, specific small molecule, chemical, or drug administration, etc.), which acts upon the promoter upstream of said polynucleotides to induce expression of the encoded protein product. As such the beneficial therapeutic affect of the present invention may be expressly modulated (i.e. to increase, decrease, or inhibit expression of the present invention) based upon said external stimulus.

[1592] Polynucleotides of the present invention may be useful in repressing expression of oncogenic genes or antigens. By “repressing expression of the oncogenic genes” is intended the suppression of the transcription of the gene, the degradation of the gene transcript (pre-message RNA), the inhibition of splicing, the destruction of the messenger RNA, the prevention of the post-translational modifications of the protein, the destruction of the protein, or the inhibition of the normal function of the protein.

[1593] For local administration to abnormally proliferating cells, polynucleotides of the present invention may be administered by any method known to those of skill in the art including, but not limited to transfection, electroporation, microinjection of cells, or in vehicles such as liposomes, lipofectin, or as naked polynucleotides, or any other method described throughout the specification. The polynucleotide of the present invention may be delivered by known gene delivery systems such as, but not limited to, retroviral vectors (Gilboa, J. Virology 44:845 (1982); Hocke, Nature 320:275 (1986); Wilson, et al., Proc. Natl. Acad. Sci. U.S.A. 85:3014), vaccinia virus system (Chakrabarty et al., Mol. Cell Biol. 5:3403 (1985) or other efficient DNA delivery systems (Yates et al., Nature 313:812 (1985)) known to those skilled in the art. These references are exemplary only and are hereby incorporated by reference. In order to specifically deliver or transfect cells which are abnormally proliferating and spare non-dividing cells, it is preferable to utilize a retrovirus, or adenoviral (as described in the art and elsewhere herein) delivery system known to those of skill in the art. Since host DNA replication is required for retroviral DNA to integrate and the retrovirus will be unable to self replicate due to the lack of the retrovirus genes needed for its life cycle. Utilizing such a retroviral delivery system for polynucleotides of the present invention will target said gene and constructs to abnormally proliferating cells and will spare the non-dividing normal cells.

[1594] The polynucleotides of the present invention may be delivered directly to cell proliferative disorder/disease sites in internal organs, body cavities and the like by use of imaging devices used to guide an injecting needle directly to the disease site. The polynucleotides of the present invention may also be administered to disease sites at the time of surgical intervention.

[1595] By “cell proliferative disease” is meant any human or animal disease or disorder, affecting any one or any combination of organs, cavities, or body parts, which is characterized by single or multiple local abnormal proliferations of cells, groups of cells, or tissues, whether benign or malignant.

[1596] Any amount of the polynucleotides of the present invention may be administered as long as it has a biologically inhibiting effect on the proliferation of the treated cells. Moreover, it is possible to administer more than one of the polynucleotide of the present invention simultaneously to the same site. By “biologically inhibiting” is meant partial or total growth inhibition as well as decreases in the rate of proliferation or growth of the cells. The biologically inhibitory dose may be determined by assessing the effects of the polynucleotides of the present invention on target malignant or abnormally proliferating cell growth in tissue culture, tumor growth in animals and cell cultures, or any other method known to one of ordinary skill in the art.

[1597] The present invention is further directed to antibody-based therapies which involve administering of anti-polypeptides and anti-polynucleotide antibodies to a mammalian, preferably human, patient for treating one or more of the described disorders. Methods for producing anti-polypeptides and anti-polynucleotide antibodies polyclonal and monoclonal antibodies are described in detail elsewhere herein. Such antibodies may be provided in pharmaceutically acceptable compositions as known in the art or as described herein.

[1598] A summary of the ways in which the antibodies of the present invention may be used therapeutically includes binding polynucleotides or polypeptides of the present invention locally or systemically in the body or by direct cytotoxicity of the antibody, e.g. as mediated by complement (CDC) or by effector cells (ADCC). Some of these approaches are described in more detail below. Armed with the teachings provided herein, one of ordinary skill in the art will know how to use the antibodies of the present invention for diagnostic, monitoring or therapeutic purposes without undue experimentation.

[1599] In particular, the antibodies, fragments and derivatives of the present invention are useful for treating a subject having or developing cell proliferative and/or differentiation disorders as described herein. Such treatment comprises administering a single or multiple doses of the antibody, or a fragment, derivative, or a conjugate thereof.

[1600] The antibodies of this invention may be advantageously utilized in combination with other monoclonal or chimeric antibodies, or with lymphokines or hematopoietic growth factors, for example, which serve to increase the number or activity of effector cells which interact with the antibodies.

[1601] It is preferred to use high affinity and/or potent in vivo inhibiting and/or neutralizing antibodies against polypeptides or polynucleotides of the present invention, fragments or regions thereof, for both immunoassays directed to and therapy of disorders related to polynucleotides or polypeptides, including fragements thereof, of the present invention. Such antibodies, fragments, or regions, will preferably have an affinity for polynucleotides or polypeptides, including fragements thereof. Preferred binding affinities include those with a dissociation constant or Kd less than 5×10⁻⁶M, 10⁻⁶M, 5×10⁻⁷M, 10⁻⁷M, 5×10⁻⁸M, 10⁻⁸M, 5×10⁻⁹M, 10⁻⁹M, 5×10⁻¹⁰M, 10⁻¹⁰M, 5×10⁻¹¹M, 10⁻¹¹M, 5×10⁻¹²M, 10⁻¹²M, 5×10⁻¹³M, 10⁻¹³M, 5×10⁻¹⁴M, 10⁻¹⁴M, 5×10⁻¹⁵M, and 10⁻¹⁵M.

[1602] Moreover, polypeptides of the present invention are useful in inhibiting the angiogenesis of proliferative cells or tissues, either alone, as a protein fusion, or in combination with other polypeptides directly or indirectly, as described elsewhere herein. In a most preferred embodiment, said anti-angiogenesis effect may be achieved indirectly, for example, through the inhibition of hematopoietic, tumor-specific cells, such as tumor-associated macrophages (See Joseph I B, et al. J Natl Cancer Inst, 90(21):1648-53 (1998), which is hereby incorporated by reference). Antibodies directed to polypeptides or polynucleotides of the present invention may also result in inhibition of angiogenesis directly, or indirectly (See Witte L, et al., Cancer Metastasis Rev. 17(2):155-61 (1998), which is hereby incorporated by reference)).

[1603] Polypeptides, including protein fusions, of the present invention, or fragments thereof may be useful in inhibiting proliferative cells or tissues through the induction of apoptosis. Said polypeptides may act either directly, or indirectly to induce apoptosis of proliferative cells and tissues, for example in the activation of a death-domain receptor, such as tumor necrosis factor (TNF) receptor-1, CD95 (Fas/APO-1), TNF-receptor-related apoptosis-mediated protein (TRAMP) and TNF-related apoptosis-inducing ligand (TRAIL) receptor-1 and -2 (See Schulze-Osthoff K, et. al., Eur J Biochem 254(3):439-59 (1998), which is hereby incorporated by reference). Moreover, in another preferred embodiment of the present invention, said polypeptides may induce apoptosis through other mechanisms, such as in the activation of other proteins which will activate apoptosis, or through stimulating the expression of said proteins, either alone or in combination with small molecule drugs or adjuviants, such as apoptonin, galectins, thioredoxins, anti-inflammatory proteins (See for example, Mutat Res 400(1-2):447-55 (1998), Med Hypotheses. 50(5):423-33 (1998), Chem Biol Interact. April 24; 111-112:23-34 (1998), J Mol Med. 76(6):402-12 (1998), Int J Tissue React; 20(1):3-15 (1998), which are all hereby incorporated by reference).

[1604] Polypeptides, including protein fusions to, or fragments thereof, of the present invention are useful in inhibiting the metastasis of proliferative cells or tissues. Inhibition may occur as a direct result of administering polypeptides, or antibodies directed to said polypeptides as described elsewere herein, or indirectly, such as activating the expression of proteins known to inhibit metastasis, for example alpha 4 integrins, (See, e.g., Curr Top Microbiol Immunol 1998; 231:125-41, which is hereby incorporated by reference). Such thereapeutic affects of the present invention may be achieved either alone, or in combination with small molecule drugs or adjuvants.

[1605] In another embodiment, the invention provides a method of delivering compositions containing the polypeptides of the invention (e.g., compositions containing polypeptides or polypeptide antibodes associated with heterologous polypeptides, heterologous nucleic acids, toxins, or prodrugs) to targeted cells expressing the polypeptide of the present invention. Polypeptides or polypeptide antibodes of the invention may be associated with with heterologous polypeptides, heterologous nucleic acids, toxins, or prodrugs via hydrophobic, hydrophilic, ionic and/or covalent interactions.

[1606] Polypeptides, protein fusions to, or fragments thereof, of the present invention are useful in enhancing the immunogenicity and/or antigenicity of proliferating cells or tissues, either directly, such as would occur if the polypeptides of the present invention ‘vaccinated’ the immune response to respond to proliferative antigens and immunogens, or indirectly, such as in activating the expression of proteins known to enhance the immune response (e.g. chemokines), to said antigens and immunogens.

Renal Disorders

[1607] Polynucleotides, polypeptides, antibodies, and/or agonists or antagonists of the present invention, may be used to treat, prevent, diagnose, and/or prognose disorders of the renal system. Renal disorders which can be diagnosed, prognosed, prevented, and/or treated with compositions of the invention include, but are not limited to, kidney failure, nephritis, blood vessel disorders of kidney, metabolic and congenital kidney disorders, urinary disorders of the kidney, autoimmune disorders, sclerosis and necrosis, electrolyte imbalance, and kidney cancers.

[1608] Kidney diseases which can be diagnosed, prognosed, prevented, and/or treated with compositions of the invention include, but are not limited to, acute kidney failure, chronic kidney failure, atheroembolic renal failure, end-stage renal disease, inflammatory diseases of the kidney (e.g., acute glomerulonephritis, postinfectious glomerulonephritis, rapidly progressive glomerulonephritis, nephrotic syndrome, membranous glomerulonephritis, familial nephrotic syndrome, membranoproliferative glomerulonephritis I and II, mesangial proliferative glomerulonephritis, chronic glomerulonephritis, acute tubulointerstitial nephritis, chronic tubulointerstitial nephritis, acute post-streptococcal glomerulonephritis (PSGN), pyelonephritis, lupus nephritis, chronic nephritis, interstitial nephritis, and post-streptococcal glomerulonephritis), blood vessel disorders of the kidneys (e.g., kidney infarction, atheroembolic kidney disease, cortical necrosis, malignant nephrosclerosis, renal vein thrombosis, renal underperfusion, renal retinopathy, renal ischemia-reperfusion, renal artery embolism, and renal artery stenosis), and kidney disorders resulting form urinary tract disease (e.g., pyelonephritis, hydronephrosis, urolithiasis (renal lithiasis, nephrolithiasis), reflux nephropathy, urinary tract infections, urinary retention, and acute or chronic unilateral obstructive uropathy.)

[1609] In addition, compositions of the invention can be used to diagnose, prognose, prevent, and/or treat metabolic and congenital disorders of the kidney (e.g., uremia, renal amyloidosis, renal osteodystrophy, renal tubular acidosis, renal glycosuria, nephrogenic diabetes insipidus, cystinuria, Fanconi's syndrome, renal fibrocystic osteosis (renal rickets), Hartnup disease, Bartter's syndrome, Liddle's syndrome, polycystic kidney disease, medullary cystic disease, medullary sponge kidney, Alport's syndrome, nail-patella syndrome, congenital nephrotic syndrome, CRUSH syndrome, horseshoe kidney, diabetic nephropathy, nephrogenic diabetes insipidus, analgesic nephropathy, kidney stones, and membranous nephropathy), and autoimmune disorders of the kidney (e.g., systemic lupus erythematosus (SLE), Goodpasture syndrome, IgA nephropathy, and IgM mesangial proliferative glomerulonephritis).

[1610] Compositions of the invention can also be used to diagnose, prognose, prevent, and/or treat sclerotic or necrotic disorders of the kidney (e.g., glomerulosclerosis, diabetic nephropathy, focal segmental glomerulosclerosis (FSGS), necrotizing glomerulonephritis, and renal papillary necrosis), cancers of the kidney (e.g., nephroma, hypernephroma, nephroblastoma, renal cell cancer, transitional cell cancer, renal adenocarcinoma, squamous cell cancer, and Wilm's tumor), and electrolyte imbalances (e.g., nephrocalcinosis, pyuria, edema, hydronephritis, proteinuria, hyponatremia, hypematremia, hypokalemia, hyperkalemia, hypocalcemia, hypercalcemia, hypophosphatemia, and hyperphosphatemia).

[1611] Polypeptides may be administered using any method known in the art, including, but not limited to, direct needle injection at the delivery site, intravenous injection, topical administration, catheter infusion, biolistic injectors, particle accelerators, gelfoam sponge depots, other commercially available depot materials, osmotic pumps, oral or suppositorial solid pharmaceutical formulations, decanting or topical applications during surgery, aerosol delivery. Such methods are known in the art. Polypeptides may be administered as part of a Therapeutic, described in more detail below. Methods of delivering polynucleotides are described in more detail herein.

Cardiovascular Disorders

[1612] Polynucleotides or polypeptides, or agonists or antagonists of the present invention, may be used to treat, prevent, diagnose, and/or prognose cardiovascular disorders, including, but not limited to, peripheral artery disease, such as limb ischemia.

[1613] Cardiovascular disorders include, but are not limited to, cardiovascular abnormalities, such as arterio-arterial fistula, arteriovenous fistula, cerebral arteriovenous malformations, congenital heart defects, pulmonary atresia, and Scimitar Syndrome. Congenital heart defects include, but are not limited to, aortic coarctation, cor triatriatum, coronary vessel anomalies, crisscross heart, dextrocardia, patent ductus arteriosus, Ebstein's anomaly, Eisenmenger complex, hypoplastic left heart syndrome, levocardia, tetralogy of fallot, transposition of great vessels, double outlet right ventricle, tricuspid atresia, persistent truncus arteriosus, and heart septal defects, such as aortopulmonary septal defect, endocardial cushion defects, Lutembacher's Syndrome, trilogy of Fallot, ventricular heart septal defects.

[1614] Cardiovascular disorders also include, but are not limited to, heart disease, such as arrhythmias, carcinoid heart disease, high cardiac output, low cardiac output, cardiac tamponade, endocarditis (including bacterial), heart aneurysm, cardiac arrest, congestive heart failure, congestive cardiomyopathy, paroxysmal dyspnea, cardiac edema, heart hypertrophy, congestive cardiomyopathy, left ventricular hypertrophy, right ventricular hypertrophy, post-infarction heart rupture, ventricular septal rupture, heart valve diseases, myocardial diseases, myocardial ischemia, pericardial effusion, pericarditis (including constrictive and tuberculous), pneumopericardium, postpericardiotomy syndrome, pulmonary heart disease, rheumatic heart disease, ventricular dysfunction, hyperemia, cardiovascular pregnancy complications, Scimitar Syndrome, cardiovascular syphilis, and cardiovascular tuberculosis.

[1615] Arrhythmias include, but are not limited to, sinus arrhythmia, atrial fibrillation, atrial flutter, bradycardia, extrasystole, Adams-Stokes Syndrome, bundle-branch block, sinoatrial block, long QT syndrome, parasystole, Lown-Ganong-Levine Syndrome, Mahaim-type pre-excitation syndrome, Wolff-Parkinson-White syndrome, sick sinus syndrome, tachycardias, and ventricular fibrillation. Tachycardias include paroxysmal tachycardia, supraventricular tachycardia, accelerated idioventricular rhythm, atrioventricular nodal reentry tachycardia, ectopic atrial tachycardia, ectopic junctional tachycardia, sinoatrial nodal reentry tachycardia, sinus tachycardia, Torsades de Pointes, and ventricular tachycardia.

[1616] Heart valve diseases include, but are not limited to, aortic valve insufficiency, aortic valve stenosis, hear murmurs, aortic valve prolapse, mitral valve prolapse, tricuspid valve prolapse, mitral valve insufficiency, mitral valve stenosis, pulmonary atresia, pulmonary valve insufficiency, pulmonary valve stenosis, tricuspid atresia, tricuspid valve insufficiency, and tricuspid valve stenosis.

[1617] Myocardial diseases include, but are not limited to, alcoholic cardiomyopathy, congestive cardiomyopathy, hypertrophic cardiomyopathy, aortic subvalvular stenosis, pulmonary subvalvular stenosis, restrictive cardiomyopathy, Chagas cardiomyopathy, endocardial fibroelastosis, endomyocardial fibrosis, Kearns Syndrome, myocardial reperfusion injury, and myocarditis.

[1618] Myocardial ischemias include, but are not limited to, coronary disease, such as angina pectoris, coronary aneurysm, coronary arteriosclerosis, coronary thrombosis, coronary vasospasm, myocardial infarction and myocardial stunning.

[1619] Cardiovascular diseases also include vascular diseases such as aneurysms, angiodysplasia, angiomatosis, bacillary angiomatosis, Hippel-Lindau Disease, Klippel-Trenaunay-Weber Syndrome, Sturge-Weber Syndrome, angioneurotic edema, aortic diseases, Takayasu's Arteritis, aortitis, Leriche's Syndrome, arterial occlusive diseases, arteritis, enarteritis, polyarteritis nodosa, cerebrovascular disorders, diabetic angiopathies, diabetic retinopathy, embolisms, thrombosis, erythromelalgia, hemorrhoids, hepatic veno-occlusive disease, hypertension, hypotension, ischemia, peripheral vascular diseases, phlebitis, pulmonary veno-occlusive disease, Raynaud's disease, CREST syndrome, retinal vein occlusion, Scimitar syndrome, superior vena cava syndrome, telangiectasia, atacia telangiectasia, hereditary hemorrhagic telangiectasia, varicocele, varicose veins, varicose ulcer, vasculitis, and venous insufficiency.

[1620] Aneurysms include, but are not limited to, dissecting aneurysms, false aneurysms, infected aneurysms, ruptured aneurysms, aortic aneurysms, cerebral aneurysms, coronary aneurysms, heart aneurysms, and iliac aneurysms.

[1621] Arterial occlusive diseases include, but are not limited to, arteriosclerosis, intermittent claudication, carotid stenosis, fibromuscular dysplasias, mesenteric vascular occlusion, Moyamoya disease, renal artery obstruction, retinal artery occlusion, and thromboangiitis obliterans.

[1622] Cerebrovascular disorders include, but are not limited to, carotid artery diseases, cerebral amyloid angiopathy, cerebral aneurysm, cerebral anoxia, cerebral arteriosclerosis, cerebral arteriovenous malformation, cerebral artery diseases, cerebral embolism and thrombosis, carotid artery thrombosis, sinus thrombosis, Wallenberg's syndrome, cerebral hemorrhage, epidural hematoma, subdural hematoma, subaraxhnoid hemorrhage, cerebral infarction, cerebral ischemia (including transient), subclavian steal syndrome, periventricular leukomalacia, vascular headache, cluster headache, migraine, and vertebrobasilar insufficiency.

[1623] Embolisms include, but are not limited to, air embolisms, amniotic fluid embolisms, cholesterol embolisms, blue toe syndrome, fat embolisms, pulmonary embolisms, and thromoboembolisms. Thrombosis include, but are not limited to, coronary thrombosis, hepatic vein thrombosis, retinal vein occlusion, carotid artery thrombosis, sinus thrombosis, Wallenberg's syndrome, and thrombophlebitis.

[1624] Ischemic disorders include, but are not limited to, cerebral ischemia, ischemic colitis, compartment syndromes, anterior compartment syndrome, myocardial ischemia, reperfusion injuries, and peripheral limb ischemia. Vasculitis includes, but is not limited to, aortitis, arteritis, Behcet's Syndrome, Churg-Strauss Syndrome, mucocutaneous lymph node syndrome, thromboangiitis obliterans, hypersensitivity vasculitis, Schoenlein-Henoch purpura, allergic cutaneous vasculitis, and Wegener's granulomatosis.

[1625] Polypeptides may be administered using any method known in the art, including, but not limited to, direct needle injection at the delivery site, intravenous injection, topical administration, catheter infusion, biolistic injectors, particle accelerators, gelfoam sponge depots, other commercially available depot materials, osmotic pumps, oral or suppositorial solid pharmaceutical formulations, decanting or topical applications during surgery, aerosol delivery. Such methods are known in the art. Polypeptides may be administered as part of a Therapeutic, described in more detail below. Methods of delivering polynucleotides are described in more detail herein.

Respiratory Disorders

[1626] Polynucleotides or polypeptides, or agonists or antagonists of the present invention may be used to treat, prevent, diagnose, and/or prognose diseases and/or disorders of the respiratory system.

[1627] Diseases and disorders of the respiratory system include, but are not limited to, nasal vestibulitis, nonallergic rhinitis (e.g., acute rhinitis, chronic rhinitis, atrophic rhinitis, vasomotor rhinitis), nasal polyps, and sinusitis, juvenile angiofibromas, cancer of the nose and juvenile papillomas, vocal cord polyps, nodules (singer's nodules), contact ulcers, vocal cord paralysis, laryngoceles, pharyngitis (e.g., viral and bacterial), tonsillitis, tonsillar cellulitis, parapharyngeal abscess, laryngitis, laryngoceles, and throat cancers (e.g., cancer of the nasopharynx, tonsil cancer, larynx cancer), lung cancer (e.g., squamous cell carcinoma, small cell (oat cell) carcinoma, large cell carcinoma, and adenocarcinoma), allergic disorders (eosinophilic pneumonia, hypersensitivity pneumonitis (e.g., extrinsic allergic alveolitis, allergic interstitial pneumonitis, organic dust pneumoconiosis, allergic bronchopulmonary aspergillosis, asthma, Wegener's granulomatosis (granulomatous vasculitis), Goodpasture's syndrome)), pneumonia (e.g., bacterial pneumonia (e.g., Streptococcus pneumoniae (pneumoncoccal pneumonia), Staphylococcus aureus (staphylococcal pneumonia), Gram-negative bacterial pneumonia (caused by, e.g., Klebsiella and Pseudomas spp.), Mycoplasma pneumoniae pneumonia, Hemophilus influenzae pneumonia, Legionella pneumophila (Legionnaires' disease), and Chlamydia psittaci (Psittacosis)), and viral pneumonia (e.g., influenza, chickenpox (varicella).

[1628] Additional diseases and disorders of the respiratory system include, but are not limited to bronchiolitis, polio (poliomyelitis), croup, respiratory syncytial viral infection, mumps, erythema infectiosum (fifth disease), roseola infantum, progressive rubella panencephalitis, german measles, and subacute sclerosing panencephalitis), fungal pneumonia (e.g., Histoplasmosis, Coccidioidomycosis, Blastomycosis, fungal infections in people with severely suppressed immune systems (e.g., cryptococcosis, caused by Cryptococcus neoformans; aspergillosis, caused by Aspergillus spp.; candidiasis, caused by Candida; and mucormycosis)), Pneumocystis carinii (pneumocystis pneumonia), atypical pneumonias (e.g., Mycoplasma and Chlamydia spp.), opportunistic infection pneumonia, nosocomial pneumonia, chemical pneumonitis, and aspiration pneumonia, pleural disorders (e.g., pleurisy, pleural effusion, and pneumothorax (e.g., simple spontaneous pneumothorax, complicated spontaneous pneumothorax, tension pneumothorax)), obstructive airway diseases (e.g., asthma, chronic obstructive pulmonary disease (COPD), emphysema, chronic or acute bronchitis), occupational lung diseases (e.g., silicosis, black lung (coal workers' pneumoconiosis), asbestosis, berylliosis, occupational asthsma, byssinosis, and benign pneumoconioses), Infiltrative Lung Disease (e.g., pulmonary fibrosis (e.g., fibrosing alveolitis, usual interstitial pneumonia), idiopathic pulmonary fibrosis, desquamative interstitial pneumonia, lymphoid interstitial pneumonia, histiocytosis X (e.g., Letterer-Siwe disease, Hand-Schüller-Christian disease, eosinophilic granuloma), idiopathic pulmonary hemosiderosis, sarcoidosis and pulmonary alveolar proteinosis), Acute respiratory distress syndrome (also called, e.g., adult respiratory distress syndrome), edema, pulmonary embolism, bronchitis (e.g., viral, bacterial), bronchiectasis, atelectasis, lung abscess (caused by, e.g., Staphylococcus aureus or Legionella pneumophila), and cystic fibrosis.

Anti-Angiogenesis Activity

[1629] The naturally occurring balance between endogenous stimulators and inhibitors of angiogenesis is one in which inhibitory influences predominate. Rastinejad et al., Cell 56:345-355 (1989). In those rare instances in which neovascularization occurs under normal physiological conditions, such as wound healing, organ regeneration, embryonic development, and female reproductive processes, angiogenesis is stringently regulated and spatially and temporally delimited. Under conditions of pathological angiogenesis such as that characterizing solid tumor growth, these regulatory controls fail. Unregulated angiogenesis becomes pathologic and sustains progression of many neoplastic and non-neoplastic diseases. A number of serious diseases are dominated by abnormal neovascularization including solid tumor growth and metastases, arthritis, some types of eye disorders, and psoriasis. See, e.g., reviews by Moses et al., Biotech. 9:630-634 (1991); Folkman et al., N. Engl. J. Med., 333:1757-1763 (1995); Auerbach et al., J. Microvasc. Res. 29:401-411 (1985); Folkman, Advances in Cancer Research, eds. Klein and Weinhouse, Academic Press, New York, pp. 175-203 (1985); Patz, Am. J. Opthalmol. 94:715-743 (1982); and Folkman et al., Science 221:719-725 (1983). In a number of pathological conditions, the process of angiogenesis contributes to the disease state. For example, significant data have accumulated which suggest that the growth of solid tumors is dependent on angiogenesis. Folkman and Klagsbrun, Science 235:442-447 (1987).

[1630] The present invention provides for treatment of diseases or disorders associated with neovascularization by administration of the polynucleotides and/or polypeptides of the invention, as well as agonists or antagonists of the present invention. Malignant and metastatic conditions which can be treated with the polynucleotides and polypeptides, or agonists or antagonists of the invention include, but are not limited to, malignancies, solid tumors, and cancers described herein and otherwise known in the art (for a review of such disorders, see Fishman et al., Medicine, 2d Ed., J. B. Lippincott Co., Philadelphia (1985)). Thus, the present invention provides a method of treating an angiogenesis-related disease and/or disorder, comprising administering to an individual in need thereof a therapeutically effective amount of a polynucleotide, polypeptide, antagonist and/or agonist of the invention. For example, polynucleotides, polypeptides, antagonists and/or agonists may be utilized in a variety of additional methods in order to therapeutically treat a cancer or tumor. Cancers which may be treated with polynucleotides, polypeptides, antagonists and/or agonists include, but are not limited to solid tumors, including prostate, lung, breast, ovarian, stomach, pancreas, larynx, esophagus, testes, liver, parotid, biliary tract, colon, rectum, cervix, uterus, endometrium, kidney, bladder, thyroid cancer; primary tumors and metastases; melanomas; glioblastoma; Kaposi's sarcoma; leiomyosarcoma; non-small cell lung cancer; colorectal cancer; advanced malignancies; and blood born tumors such as leukemias. For example, polynucleotides, polypeptides, antagonists and/or agonists may be delivered topically, in order to treat cancers such as skin cancer, head and neck tumors, breast tumors, and Kaposi's sarcoma.

[1631] Within yet other aspects, polynucleotides, polypeptides, antagonists and/or agonists may be utilized to treat superficial forms of bladder cancer by, for example, intravesical administration. Polynucleotides, polypeptides, antagonists and/or agonists may be delivered directly into the tumor, or near the tumor site, via injection or a catheter. Of course, as the artisan of ordinary skill will appreciate, the appropriate mode of administration will vary according to the cancer to be treated. Other modes of delivery are discussed herein.

[1632] Polynucleotides, polypeptides, antagonists and/or agonists may be useful in treating other disorders, besides cancers, which involve angiogenesis. These disorders include, but are not limited to: benign tumors, for example hemangiomas, acoustic neuromas, neurofibromas, trachomas, and pyogenic granulomas; artheroscleric plaques; ocular angiogenic diseases, for example, diabetic retinopathy, retinopathy of prematurity, macular degeneration, corneal graft rejection, neovascular glaucoma, retrolental fibroplasia, rubeosis, retinoblastoma, uvietis and Pterygia (abnormal blood vessel growth) of the eye; rheumatoid arthritis; psoriasis; delayed wound healing; endometriosis; vasculogenesis; granulations; hypertrophic scars (keloids); nonunion fractures; scleroderma; trachoma; vascular adhesions; myocardial angiogenesis; coronary collaterals; cerebral collaterals; arteriovenous malformations; ischemic limb angiogenesis; Osler-Webber Syndrome; plaque neovascularization; telangiectasia; hemophiliac joints; angiofibroma; fibromuscular dysplasia; wound granulation; Crohn's disease; and atherosclerosis.

[1633] For example, within one aspect of the present invention methods are provided for treating hypertrophic scars and keloids, comprising the step of administering a polynucleotide, polypeptide, antagonist and/or agonist of the invention to a hypertrophic scar or keloid.

[1634] Within one embodiment of the present invention polynucleotides, polypeptides, antagonists and/or agonists of the invention are directly injected into a hypertrophic scar or keloid, in order to prevent the progression of these lesions. This therapy is of particular value in the prophylactic treatment of conditions which are known to result in the development of hypertrophic scars and keloids (e.g., burns), and is preferably initiated after the proliferative phase has had time to progress (approximately 14 days after the initial injury), but before hypertrophic scar or keloid development. As noted above, the present invention also provides methods for treating neovascular diseases of the eye, including for example, corneal neovascularization, neovascular glaucoma, proliferative diabetic retinopathy, retrolental fibroplasia and macular degeneration.

[1635] Moreover, Ocular disorders associated with neovascularization which can be treated with the polynucleotides and polypeptides of the present invention (including agonists and/or antagonists) include, but are not limited to: neovascular glaucoma, diabetic retinopathy, retinoblastoma, retrolental fibroplasia, uveitis, retinopathy of prematurity macular degeneration, corneal graft neovascularization, as well as other eye inflammatory diseases, ocular tumors and diseases associated with choroidal or iris neovascularization. See, e.g., reviews by Waltman et al., Am. J. Ophthal. 85:704-710 (1978) and Gartner et al., Surv. Ophthal. 22:291-312 (1978).

[1636] Thus, within one aspect of the present invention methods are provided for treating neovascular diseases of the eye such as corneal neovascularization (including corneal graft neovascularization), comprising the step of administering to a patient a therapeutically effective amount of a compound (as described above) to the cornea, such that the formation of blood vessels is inhibited. Briefly, the cornea is a tissue which normally lacks blood vessels. In certain pathological conditions however, capillaries may extend into the cornea from the pericorneal vascular plexus of the limbus. When the cornea becomes vascularized, it also becomes clouded, resulting in a decline in the patient's visual acuity. Visual loss may become complete if the cornea completely opacitates. A wide variety of disorders can result in corneal neovascularization, including for example, corneal infections (e.g., trachoma, herpes simplex keratitis, leishmaniasis and onchocerciasis), immunological processes (e.g., graft rejection and Stevens-Johnson's syndrome), alkali burns, trauma, inflammation (of any cause), toxic and nutritional deficiency states, and as a complication of wearing contact lenses.

[1637] Within particularly preferred embodiments of the invention, may be prepared for topical administration in saline (combined with any of the preservatives and antimicrobial agents commonly used in ocular preparations), and administered in eyedrop form. The solution or suspension may be prepared in its pure form and administered several times daily. Alternatively, anti-angiogenic compositions, prepared as described above, may also be administered directly to the cornea. Within preferred embodiments, the anti-angiogenic composition is prepared with a muco-adhesive polymer which binds to cornea. Within further embodiments, the anti-angiogenic factors or anti-angiogenic compositions may be utilized as an adjunct to conventional steroid therapy. Topical therapy may also be useful prophylactically in corneal lesions which are known to have a high probability of inducing an angiogenic response (such as chemical burns). In these instances the treatment, likely in combination with steroids, may be instituted immediately to help prevent subsequent complications.

[1638] Within other embodiments, the compounds described above may be injected directly into the corneal stroma by an ophthalmologist under microscopic guidance. The preferred site of injection may vary with the morphology of the individual lesion, but the goal of the administration would be to place the composition at the advancing front of the vasculature (i.e., interspersed between the blood vessels and the normal cornea). In most cases this would involve perilimbic corneal injection to “protect” the cornea from the advancing blood vessels. This method may also be utilized shortly after a corneal insult in order to prophylactically prevent corneal neovascularization. In this situation the material could be injected in the perilimbic cornea interspersed between the corneal lesion and its undesired potential limbic blood supply. Such methods may also be utilized in a similar fashion to prevent capillary invasion of transplanted corneas. In a sustained-release form injections might only be required 2-3 times per year. A steroid could also be added to the injection solution to reduce inflammation resulting from the injection itself.

[1639] Within another aspect of the present invention, methods are provided for treating neovascular glaucoma, comprising the step of administering to a patient a therapeutically effective amount of a polynucleotide, polypeptide, antagonist and/or agonist to the eye, such that the formation of blood vessels is inhibited. In one embodiment, the compound may be administered topically to the eye in order to treat early forms of neovascular glaucoma. Within other embodiments, the compound may be implanted by injection into the region of the anterior chamber angle. Within other embodiments, the compound may also be placed in any location such that the compound is continuously released into the aqueous humor. Within another aspect of the present invention, methods are provided for treating proliferative diabetic retinopathy, comprising the step of administering to a patient a therapeutically effective amount of a polynucleotide, polypeptide, antagonist and/or agonist to the eyes, such that the formation of blood vessels is inhibited.

[1640] Within particularly preferred embodiments of the invention, proliferative diabetic retinopathy may be treated by injection into the aqueous humor or the vitreous, in order to increase the local concentration of the polynucleotide, polypeptide, antagonist and/or agonist in the retina. Preferably, this treatment should be initiated prior to the acquisition of severe disease requiring photocoagulation.

[1641] Within another aspect of the present invention, methods are provided for treating retrolental fibroplasia, comprising the step of administering to a patient a therapeutically effective amount of a polynucleotide, polypeptide, antagonist and/or agonist to the eye, such that the formation of blood vessels is inhibited. The compound may be administered topically, via intravitreous injection and/or via intraocular implants.

[1642] Additionally, disorders which can be treated with the polynucleotides, polypeptides, agonists and/or agonists include, but are not limited to, hemangioma, arthritis, psoriasis, angiofibroma, atherosclerotic plaques, delayed wound healing, granulations, hemophilic joints, hypertrophic scars, nonunion fractures, Osler-Weber syndrome, pyogenic granuloma, scleroderma, trachoma, and vascular adhesions.

[1643] Moreover, disorders and/or states, which can be treated, prevented, diagnosed, and/or prognosed with the the polynucleotides, polypeptides, agonists and/or agonists of the invention include, but are not limited to, solid tumors, blood born tumors such as leukemias, tumor metastasis, Kaposi's sarcoma, benign tumors, for example hemangiomas, acoustic neuromas, neurofibromas, trachomas, and pyogenic granulomas, rheumatoid arthritis, psoriasis, ocular angiogenic diseases, for example, diabetic retinopathy, retinopathy of prematurity, macular degeneration, corneal graft rejection, neovascular glaucoma, retrolental fibroplasia, rubeosis, retinoblastoma, and uvietis, delayed wound healing, endometriosis, vascluogenesis, granulations, hypertrophic scars (keloids), nonunion fractures, scleroderma, trachoma, vascular adhesions, myocardial angiogenesis, coronary collaterals, cerebral collaterals, arteriovenous malformations, ischemic limb angiogenesis, Osler-Webber Syndrome, plaque neovascularization, telangiectasia, hemophiliac joints, angiofibroma fibromuscular dysplasia, wound granulation, Crohn's disease, atherosclerosis, birth control agent by preventing vascularization required for embryo implantation controlling menstruation, diseases that have angiogenesis as a pathologic consequence such as cat scratch disease (Rochele minalia quintosa), ulcers (Helicobacter pylori), Bartonellosis and bacillary angiomatosis.

[1644] In one aspect of the birth control method, an amount of the compound sufficient to block embryo implantation is administered before or after intercourse and fertilization have occurred, thus providing an effective method of birth control, possibly a “morning after” method. Polynucleotides, polypeptides, agonists and/or agonists may also be used in controlling menstruation or administered as either a peritoneal lavage fluid or for peritoneal implantation in the treatment of endometriosis.

[1645] Polynucleotides, polypeptides, agonists and/or agonists of the present invention may be incorporated into surgical sutures in order to prevent stitch granulomas.

[1646] Polynucleotides, polypeptides, agonists and/or agonists may be utilized in a wide variety of surgical procedures. For example, within one aspect of the present invention a compositions (in the form of, for example, a spray or film) may be utilized to coat or spray an area prior to removal of a tumor, in order to isolate normal surrounding tissues from malignant tissue, and/or to prevent the spread of disease to surrounding tissues. Within other aspects of the present invention, compositions (e.g., in the form of a spray) may be delivered via endoscopic procedures in order to coat tumors, or inhibit angiogenesis in a desired locale. Within yet other aspects of the present invention, surgical meshes which have been coated with anti-angiogenic compositions of the present invention may be utilized in any procedure wherein a surgical mesh might be utilized. For example, within one embodiment of the invention a surgical mesh laden with an anti-angiogenic composition may be utilized during abdominal cancer resection surgery (e.g., subsequent to colon resection) in order to provide support to the structure, and to release an amount of the anti-angiogenic factor.

[1647] Within further aspects of the present invention, methods are provided for treating tumor excision sites, comprising administering a polynucleotide, polypeptide, agonist and/or agonist to the resection margins of a tumor subsequent to excision, such that the local recurrence of cancer and the formation of new blood vessels at the site is inhibited. Within one embodiment of the invention, the anti-angiogenic compound is administered directly to the tumor excision site (e.g., applied by swabbing, brushing or otherwise coating the resection margins of the tumor with the anti-angiogenic compound). Alternatively, the anti-angiogenic compounds may be incorporated into known surgical pastes prior to administration. Within particularly preferred embodiments of the invention, the anti-angiogenic compounds are applied after hepatic resections for malignancy, and after neurosurgical operations.

[1648] Within one aspect of the present invention, polynucleotides, polypeptides, agonists and/or agonists may be administered to the resection margin of a wide variety of tumors, including for example, breast, colon, brain and hepatic tumors. For example, within one embodiment of the invention, anti-angiogenic compounds may be administered to the site of a neurological tumor subsequent to excision, such that the formation of new blood vessels at the site are inhibited.

[1649] The polynucleotides, polypeptides, agonists and/or agonists of the present invention may also be administered along with other anti-angiogenic factors. Representative examples of other anti-angiogenic factors include: Anti-Invasive Factor, retinoic acid and derivatives thereof, paclitaxel, Suramin, Tissue Inhibitor of Metalloproteinase-1, Tissue Inhibitor of Metalloproteinase-2, Plasminogen Activator Inhibitor-1, Plasminogen Activator Inhibitor-2, and various forms of the lighter “d group” transition metals.

[1650] Lighter “d group” transition metals include, for example, vanadium, molybdenum, tungsten, titanium, niobium, and tantalum species. Such transition metal species may form transition metal complexes. Suitable complexes of the above-mentioned transition metal species include oxo transition metal complexes.

[1651] Representative examples of vanadium complexes include oxo vanadium complexes such as vanadate and vanadyl complexes. Suitable vanadate complexes include metavanadate and orthovanadate complexes such as, for example, ammonium metavanadate, sodium metavanadate, and sodium orthovanadate. Suitable vanadyl complexes include, for example, vanadyl acetylacetonate and vanadyl sulfate including vanadyl sulfate hydrates such as vanadyl sulfate mono- and trihydrates.

[1652] Representative examples of tungsten and molybdenum complexes also include oxo complexes. Suitable oxo tungsten complexes include tungstate and tungsten oxide complexes. Suitable tungstate complexes include ammonium tungstate, calcium tungstate, sodium tungstate dihydrate, and tungstic acid. Suitable tungsten oxides include tungsten (IV) oxide and tungsten (VI) oxide. Suitable oxo molybdenum complexes include molybdate, molybdenum oxide, and molybdenyl complexes. Suitable molybdate complexes include ammonium molybdate and its hydrates, sodium molybdate and its hydrates, and potassium molybdate and its hydrates. Suitable molybdenum oxides include molybdenum (VI) oxide, molybdenum (VI) oxide, and molybdic acid. Suitable molybdenyl complexes include, for example, molybdenyl acetylacetonate. Other suitable tungsten and molybdenum complexes include hydroxo derivatives derived from, for example, glycerol, tartaric acid, and sugars.

[1653] A wide variety of other anti-angiogenic factors may also be utilized within the context of the present invention. Representative examples include platelet factor 4; protamine sulphate; sulphated chitin derivatives (prepared from queen crab shells), (Murata et al., Cancer Res. 51:22-26, 1991); Sulphated Polysaccharide Peptidoglycan Complex (SP-PG) (the function of this compound may be enhanced by the presence of steroids such as estrogen, and tamoxifen citrate); Staurosporine; modulators of matrix metabolism, including for example, proline analogs, cishydroxyproline, d,L-3,4-dehydroproline, Thiaproline, alpha,alpha-dipyridyl, aminopropionitrile fumarate; 4-propyl-5-(4-pyridinyl)-2 (3H)-oxazolone; Methotrexate; Mitoxantrone; Heparin; Interferons; 2 Macroglobulin-serum; ChIMP-3 (Pavloff et al., J. Bio. Chem. 267:17321-17326, 1992); Chymostatin (Tomkinson et al., Biochem J. 286:475-480, 1992); Cyclodextrin Tetradecasulfate; Eponemycin; Camptothecin; Fumagillin (Ingber et al., Nature 348:555-557, 1990); Gold Sodium Thiomalate (“GST”; Matsubara and Ziff, J. Clin. Invest. 79:1440-1446, 1987); anticollagenase-serum; alpha2-antiplasmin (Holmes et al., J. Biol. Chem. 262(4):1659-1664, 1987); Bisantrene (National Cancer Institute); Lobenzarit disodium (N-(2)-carboxyphenyl-4-chloroanthronilic acid disodium or “CCA”; Takeuchi et al., Agents Actions 36:312-316, 1992); Thalidomide; Angostatic steroid; AGM-1470; carboxynaminolmidazole; and metalloproteinase inhibitors such as BB94.

Diseases at the Cellular Level

[1654] Diseases associated with increased cell survival or the inhibition of apoptosis that could be treated, prevented, diagnosed, and/or prognosed using polynucleotides or polypeptides, as well as antagonists or agonists of the present invention, include cancers (such as follicular lymphomas, carcinomas with p53 mutations, and hormone-dependent tumors, including, but not limited to colon cancer, cardiac tumors, pancreatic cancer, melanoma, retinoblastoma, glioblastoma, lung cancer, intestinal cancer, testicular cancer, stomach cancer, neuroblastoma, myxoma, myoma, lymphoma, endothelioma, osteoblastoma, osteoclastoma, osteosarcoma, chondrosarcoma, adenoma, breast cancer, prostate cancer, Kaposi's sarcoma and ovarian cancer); autoimmune disorders (such as, multiple sclerosis, Sjogren's syndrome, Hashimoto's thyroiditis, biliary cirrhosis, Behcet's disease, Crohn's disease, polymyositis, systemic lupus erythematosus and immune-related glomerulonephritis and rheumatoid arthritis) and viral infections (such as herpes viruses, pox viruses and adenoviruses), inflammation, graft v. host disease, acute graft rejection, and chronic graft rejection.

[1655] In preferred embodiments, polynucleotides, polypeptides, and/or antagonists of the invention are used to inhibit growth, progression, and/or metasis of cancers, in particular those listed above.

[1656] Additional diseases or conditions associated with increased cell survival that could be treated or detected by polynucleotides or polypeptides, or agonists or antagonists of the present invention include, but are not limited to, progression, and/or metastases of malignancies and related disorders such as leukemia (including acute leukemias (e.g., acute lymphocytic leukemia, acute myelocytic leukemia (including myeloblastic, promyelocytic, myelomonocytic, monocytic, and erythroleukemia)) and chronic leukemias (e.g., chronic myelocytic (granulocytic) leukemia and chronic lymphocytic leukemia)), polycythemia vera, lymphomas (e.g., Hodgkin's disease and non-Hodgkin's disease), multiple myeloma, Waldenstrom's macroglobulinemia, heavy chain disease, and solid tumors including, but not limited to, sarcomas and carcinomas such as fibrosarcoma, myxosarcoma, liposarcoma, chondrosarcoma, osteogenic sarcoma, chordoma, angiosarcoma, endotheliosarcoma, lymphangiosarcoma, lymphangioendotheliosarcoma, synovioma, mesothelioma, Ewing's tumor, leiomyosarcoma, rhabdomyosarcoma, colon carcinoma, pancreatic cancer, breast cancer, ovarian cancer, prostate cancer, squamous cell carcinoma, basal cell carcinoma, adenocarcinoma, sweat gland carcinoma, sebaceous gland carcinoma, papillary carcinoma, papillary adenocarcinomas, cystadenocarcinoma, medullary carcinoma, bronchogenic carcinoma, renal cell carcinoma, hepatoma, bile duct carcinoma, choriocarcinoma, seminoma, embryonal carcinoma, Wilm's tumor, cervical cancer, testicular tumor, lung carcinoma, small cell lung carcinoma, bladder carcinoma, epithelial carcinoma, glioma, astrocytoma, medulloblastoma, craniopharyngioma, ependymoma, pinealoma, hemangioblastoma, acoustic neuroma, oligodendroglioma, menangioma, melanoma, neuroblastoma, and retinoblastoma.

[1657] Diseases associated with increased apoptosis that could be treated, prevented, diagnosed, and/or prognesed using polynucleotides or polypeptides, as well as agonists or antagonists of the present invention, include, but are not limited to, AIDS; neurodegenerative disorders (such as Alzheimer's disease, Parkinson's disease, Amyotrophic lateral sclerosis, Retinitis pigmentosa, Cerebellar degeneration and brain tumor or prior associated disease); autoimmune disorders (such as, multiple sclerosis, Sjogren's syndrome, Hashimoto's thyroiditis, biliary cirrhosis, Behcet's disease, Crohn's disease, polymyositis, systemic lupus erythematosus and immune-related glomerulonephritis and rheumatoid arthritis) myelodysplastic syndromes (such as aplastic anemia), graft v. host disease, ischemic injury (such as that caused by myocardial infarction, stroke and reperfusion injury), liver injury (e.g., hepatitis related liver injury, ischemia/reperfusion injury, cholestosis (bile duct injury) and liver cancer); toxin-induced liver disease (such as that caused by alcohol), septic shock, cachexia and anorexia.

[1658] Wound Healing and Epithelial Cell Proliferation

[1659] In accordance with yet a further aspect of the present invention, there is provided a process for utilizing polynucleotides or polypeptides, as well as agonists or antagonists of the present invention, for therapeutic purposes, for example, to stimulate epithelial cell proliferation and basal keratinocytes for the purpose of wound healing, and to stimulate hair follicle production and healing of dermal wounds. Polynucleotides or polypeptides, as well as agonists or antagonists of the present invention, may be clinically useful in stimulating wound healing including surgical wounds, excisional wounds, deep wounds involving damage of the dermis and epidermis, eye tissue wounds, dental tissue wounds, oral cavity wounds, diabetic ulcers, dermal ulcers, cubitus ulcers, arterial ulcers, venous stasis ulcers, burns resulting from heat exposure or chemicals, and other abnormal wound healing conditions such as uremia, malnutrition, vitamin deficiencies and complications associated with systemic treatment with steroids, radiation therapy and antineoplastic drugs and antimetabolites. Polynucleotides or polypeptides, as well as agonists or antagonists of the present invention, could be used to promote dermal reestablishment subsequent to dermal loss

[1660] Polynucleotides or polypeptides, as well as agonists or antagonists of the present invention, could be used to increase the adherence of skin grafts to a wound bed and to stimulate re-epithelialization from the wound bed. The following are types of grafts that polynucleotides or polypeptides, agonists or antagonists of the present invention, could be used to increase adherence to a wound bed: autografts, artificial skin, allografts, autodermic graft, autoepdermic grafts, avacular grafts, Blair-Brown grafts, bone graft, brephoplastic grafts, cutis graft, delayed graft, dermic graft, epidermic graft, fascia graft, full thickness graft, heterologous graft, xenograft, homologous graft, hyperplastic graft, lamellar graft, mesh graft, mucosal graft, Ollier-Thiersch graft, omenpal graft, patch graft, pedicle graft, penetrating graft, split skin graft, thick split graft. Polynucleotides or polypeptides, as well as agonists or antagonists of the present invention, can be used to promote skin strength and to improve the appearance of aged skin.

[1661] It is believed that polynucleotides or polypeptides, as well as agonists or antagonists of the present invention, will also produce changes in hepatocyte proliferation, and epithelial cell proliferation in the lung, breast, pancreas, stomach, small intestine, and large intestine. Polynucleotides or polypeptides, as well as agonists or antagonists of the present invention, could promote proliferation of epithelial cells such as sebocytes, hair follicles, hepatocytes, type II pneumocytes, mucin-producing goblet cells, and other epithelial cells and their progenitors contained within the skin, lung, liver, and gastrointestinal tract. Polynucleotides or polypeptides, agonists or antagonists of the present invention, may promote proliferation of endothelial cells, keratinocytes, and basal keratinocytes.

[1662] Polynucleotides or polypeptides, as well as agonists or antagonists of the present invention, could also be used to reduce the side effects of gut toxicity that result from radiation, chemotherapy treatments or viral infections. Polynucleotides or polypeptides, as well as agonists or antagonists of the present invention, may have a cytoprotective effect on the small intestine mucosa. Polynucleotides or polypeptides, as well as agonists or antagonists of the present invention, may also stimulate healing of mucositis (mouth ulcers) that result from chemotherapy and viral infections.

[1663] Polynucleotides or polypeptides, as well as agonists or antagonists of the present invention, could further be used in full regeneration of skin in full and partial thickness skin defects, including burns, (i.e., repopulation of hair follicles, sweat glands, and sebaceous glands), treatment of other skin defects such as psoriasis. Polynucleotides or polypeptides, as well as agonists or antagonists of the present invention, could be used to treat epidermolysis bullosa, a defect in adherence of the epidermis to the underlying dermis which results in frequent, open and painful blisters by accelerating reepithelialization of these lesions. Polynucleotides or polypeptides, as well as agonists or antagonists of the present invention, could also be used to treat gastric and doudenal ulcers and help heal by scar formation of the mucosal lining and regeneration of glandular mucosa and duodenal mucosal lining more rapidly. Inflammatory bowel diseases, such as Crohn's disease and ulcerative colitis, are diseases which result in destruction of the mucosal surface of the small or large intestine, respectively. Thus, polynucleotides or polypeptides, as well as agonists or antagonists of the present invention, could be used to promote the resurfacing of the mucosal surface to aid more rapid healing and to prevent progression of inflammatory bowel disease. Treatment with polynucleotides or polypeptides, agonists or antagonists of the present invention, is expected to have a significant effect on the production of mucus throughout the gastrointestinal tract and could be used to protect the intestinal mucosa from injurious substances that are ingested or following surgery. Polynucleotides or polypeptides, as well as agonists or antagonists of the present invention, could be used to treat diseases associate with the under expression.

[1664] Moreover, polynucleotides or polypeptides, as well as agonists or antagonists of the present invention, could be used to prevent and heal damage to the lungs due to various pathological states. Polynucleotides or polypeptides, as well as agonists or antagonists of the present invention, which could stimulate proliferation and differentiation and promote the repair of alveoli and brochiolar epithelium to prevent or treat acute or chronic lung damage. For example, emphysema, which results in the progressive loss of aveoli, and inhalation injuries, i.e., resulting from smoke inhalation and burns, that cause necrosis of the bronchiolar epithelium and alveoli could be effectively treated using polynucleotides or polypeptides, agonists or antagonists of the present invention. Also, polynucleotides or polypeptides, as well as agonists or antagonists of the present invention, could be used to stimulate the proliferation of and differentiation of type II pneumocytes, which may help treat or prevent disease such as hyaline membrane diseases, such as infant respiratory distress syndrome and bronchopulmonary displasia, in premature infants.

[1665] Polynucleotides or polypeptides, as well as agonists or antagonists of the present invention, could stimulate the proliferation and differentiation of hepatocytes and, thus, could be used to alleviate or treat liver diseases and pathologies such as fulminant liver failure caused by cirrhosis, liver damage caused by viral hepatitis and toxic substances (i.e., acetaminophen, carbon tetraholoride and other hepatotoxins known in the art).

[1666] In addition, polynucleotides or polypeptides, as well as agonists or antagonists of the present invention, could be used treat or prevent the onset of diabetes mellitus. In patients with newly diagnosed Types I and II diabetes, where some islet cell function remains, polynucleotides or polypeptides, as well as agonists or antagonists of the present invention, could be used to maintain the islet function so as to alleviate, delay or prevent permanent manifestation of the disease. Also, polynucleotides or polypeptides, as well as agonists or antagonists of the present invention, could be used as an auxiliary in islet cell transplantation to improve or promote islet cell function.

Neural Activity and Neurological Diseases

[1667] The polynucleotides, polypeptides and agonists or antagonists of the invention may be used for the diagnosis and/or treatment of diseases, disorders, damage or injury of the brain and/or nervous system. Nervous system disorders that can be treated with the compositions of the invention (e.g., polypeptides, polynucleotides, and/or agonists or antagonists), include, but are not limited to, nervous system injuries, and diseases or disorders which result in either a disconnection of axons, a diminution or degeneration of neurons, or demyelination. Nervous system lesions which may be treated in a patient (including human and non-human mammalian patients) according to the methods of the invention, include but are not limited to, the following lesions of either the central (including spinal cord, brain) or peripheral nervous systems: (1) ischemic lesions, in which a lack of oxygen in a portion of the nervous system results in neuronal injury or death, including cerebral infarction or ischemia, or spinal cord infarction or ischemia; (2) traumatic lesions, including lesions caused by physical injury or associated with surgery, for example, lesions which sever a portion of the nervous system, or compression injuries; (3) malignant lesions, in which a portion of the nervous system is destroyed or injured by malignant tissue which is either a nervous system associated malignancy or a malignancy derived from non-nervous system tissue; (4) infectious lesions, in which a portion of the nervous system is destroyed or injured as a result of infection, for example, by an abscess or associated with infection by human immunodeficiency virus, herpes zoster, or herpes simplex virus or with Lyme disease, tuberculosis, or syphilis; (5) degenerative lesions, in which a portion of the nervous system is destroyed or injured as a result of a degenerative process including but not limited to, degeneration associated with Parkinson's disease, Alzheimer's disease, Huntington's chorea, or amyotrophic lateral sclerosis (ALS); (6) lesions associated with nutritional diseases or disorders, in which a portion of the nervous system is destroyed or injured by a nutritional disorder or disorder of metabolism including, but not limited to, vitamin B12 deficiency, folic acid deficiency, Wernicke disease, tobacco-alcohol amblyopia, Marchiafava-Bignami disease (primary degeneration of the corpus callosum), and alcoholic cerebellar degeneration; (7) neurological lesions associated with systemic diseases including, but not limited to, diabetes (diabetic neuropathy, Bell's palsy), systemic lupus erythematosus, carcinoma, or sarcoidosis; (8) lesions caused by toxic substances including alcohol, lead, or particular neurotoxins; and (9) demyelinated lesions in which a portion of the nervous system is destroyed or injured by a demyelinating disease including, but not limited to, multiple sclerosis, human immunodeficiency virus-associated myelopathy, transverse myelopathy or various etiologies, progressive multifocal leukoencephalopathy, and central pontine myelinolysis.

[1668] In one embodiment, the polypeptides, polynucleotides, or agonists or antagonists of the invention are used to protect neural cells from the damaging effects of hypoxia. In a further preferred embodiment, the polypeptides, polynucleotides, or agonists or antagonists of the invention are used to protect neural cells from the damaging effects of cerebral hypoxia. According to this embodiment, the compositions of the invention are used to treat or prevent neural cell injury associated with cerebral hypoxia. In one non-exclusive aspect of this embodiment, the polypeptides, polynucleotides, or agonists or antagonists of the invention, are used to treat or prevent neural cell injury associated with cerebral ischemia. In another non-exclusive aspect of this embodiment, the polypeptides, polynucleotides, or agonists or antagonists of the invention are used to treat or prevent neural cell injury associated with cerebral infarction.

[1669] In another preferred embodiment, the polypeptides, polynucleotides, or agonists or antagonists of the invention are used to treat or prevent neural cell injury associated with a stroke. In a specific embodiment, the polypeptides, polynucleotides, or agonists or antagonists of the invention are used to treat or prevent cerebral neural cell injury associated with a stroke.

[1670] In another preferred embodiment, the polypeptides, polynucleotides, or agonists or antagonists of the invention are used to treat or prevent neural cell injury associated with a heart attack. In a specific embodiment, the polypeptides, polynucleotides, or agonists or antagonists of the invention are used to treat or prevent cerebral neural cell injury associated with a heart attack.

[1671] The compositions of the invention which are useful for treating or preventing a nervous system disorder may be selected by testing for biological activity in promoting the survival or differentiation of neurons. For example, and not by way of limitation, compositions of the invention which elicit any of the following effects may be useful according to the invention: (1) increased survival time of neurons in culture either in the presence or absence of hypoxia or hypoxic conditions; (2) increased sprouting of neurons in culture or in vivo; (3) increased production of a neuron-associated molecule in culture or in vivo, e.g., choline acetyltransferase or acetylcholinesterase with respect to motor neurons; or (4) decreased symptoms of neuron dysfunction in vivo. Such effects may be measured by any method known in the art. In preferred, non-limiting embodiments, increased survival of neurons may routinely be measured using a method set forth herein or otherwise known in the art, such as, for example, in Zhang et al., Proc Natl Acad Sci USA 97:3637-42 (2000) or in Arakawa et al., J. Neurosci., 10:3507-15 (1990); increased sprouting of neurons may be detected by methods known in the art, such as, for example, the methods set forth in Pestronk et al., Exp. Neurol., 70:65-82 (1980), or Brown et al., Ann. Rev. Neurosci., 4:17-42 (1981); increased production of neuron-associated molecules may be measured by bioassay, enzymatic assay, antibody binding, Northern blot assay, etc., using techniques known in the art and depending on the molecule to be measured; and motor neuron dysfunction may be measured by assessing the physical manifestation of motor neuron disorder, e.g., weakness, motor neuron conduction velocity, or functional disability.

[1672] In specific embodiments, motor neuron disorders that may be treated according to the invention include, but are not limited to, disorders such as infarction, infection, exposure to toxin, trauma, surgical damage, degenerative disease or malignancy that may affect motor neurons as well as other components of the nervous system, as well as disorders that selectively affect neurons such as amyotrophic lateral sclerosis, and including, but not limited to, progressive spinal muscular atrophy, progressive bulbar palsy, primary lateral sclerosis, infantile and juvenile muscular atrophy, progressive bulbar paralysis of childhood (Fazio-Londe syndrome), poliomyelitis and the post polio syndrome, and Hereditary Motorsensory Neuropathy (Charcot-Marie-Tooth Disease).

[1673] Further, polypeptides or polynucleotides of the invention may play a role in neuronal survival; synapse formation; conductance; neural differentiation, etc. Thus, compositions of the invention (including polynucleotides, polypeptides, and agonists or antagonists) may be used to diagnose and/or treat or prevent diseases or disorders associated with these roles, including, but not limited to, learning and/or cognition disorders. The compositions of the invention may also be useful in the treatment or prevention of neurodegenerative disease states and/or behavioural disorders. Such neurodegenerative disease states and/or behavioral disorders include, but are not limited to, Alzheimer's Disease, Parkinson's Disease, Huntington's Disease, Tourette Syndrome, schizophrenia, mania, dementia, paranoia, obsessive compulsive disorder, panic disorder, learning disabilities, ALS, psychoses, autism, and altered behaviors, including disorders in feeding, sleep patterns, balance, and perception. In addition, compositions of the invention may also play a role in the treatment, prevention and/or detection of developmental disorders associated with the developing embryo, or sexually-linked disorders.

[1674] Additionally, polypeptides, polynucleotides and/or agonists or antagonists of the invention, may be useful in protecting neural cells from diseases, damage, disorders, or injury, associated with cerebrovascular disorders including, but not limited to, carotid artery diseases (e.g., carotid artery thrombosis, carotid stenosis, or Moyamoya Disease), cerebral amyloid angiopathy, cerebral aneurysm, cerebral anoxia, cerebral arteriosclerosis, cerebral arteriovenous malformations, cerebral artery diseases, cerebral embolism and thrombosis (e.g., carotid artery thrombosis, sinus thrombosis, or Wallenberg's Syndrome), cerebral hemorrhage (e.g., epidural or subdural hematoma, or subarachnoid hemorrhage), cerebral infarction, cerebral ischemia (e.g., transient cerebral ischemia, Subclavian Steal Syndrome, or vertebrobasilar insufficiency), vascular dementia (e.g., multi-infarct), leukomalacia, periventricular, and vascular headache (e.g., cluster headache or migraines).

[1675] In accordance with yet a further aspect of the present invention, there is provided a process for utilizing polynucleotides or polypeptides, as well as agonists or antagonists of the present invention, for therapeutic purposes, for example, to stimulate neurological cell proliferation and/or differentiation. Therefore, polynucleotides, polypeptides, agonists and/or antagonists of the invention may be used to treat and/or detect neurologic diseases. Moreover, polynucleotides or polypeptides, or agonists or antagonists of the invention, can be used as a marker or detector of a particular nervous system disease or disorder.

[1676] Examples of neurologic diseases which can be treated or detected with polynucleotides, polypeptides, agonists, and/or antagonists of the present invention include brain diseases, such as metabolic brain diseases which includes phenylketonuria such as maternal phenylketonuria, pyruvate carboxylase deficiency, pyruvate dehydrogenase complex deficiency, Wernicke's Encephalopathy, brain edema, brain neoplasms such as cerebellar neoplasms which include infratentorial neoplasms, cerebral ventricle neoplasms such as choroid plexus neoplasms, hypothalamic neoplasms, supratentorial neoplasms, canavan disease, cerebellar diseases such as cerebellar ataxia which include spinocerebellar degeneration such as ataxia telangiectasia, cerebellar dyssynergia, Friederich's Ataxia, Machado-Joseph Disease, olivopontocerebellar atrophy, cerebellar neoplasms such as infratentorial neoplasms, diffuse cerebral sclerosis such as encephalitis periaxialis, globoid cell leukodystrophy, metachromatic leukodystrophy and subacute sclerosing panencephalitis.

[1677] Additional neurologic diseases which can be treated or detected with polynucleotides, polypeptides, agonists, and/or antagonists of the present invention include cerebrovascular disorders (such as carotid artery diseases which include carotid artery thrombosis, carotid stenosis and Moyamoya Disease), cerebral amyloid angiopathy, cerebral aneurysm, cerebral anoxia, cerebral arteriosclerosis, cerebral arteriovenous malformations, cerebral artery diseases, cerebral embolism and thrombosis such as carotid artery thrombosis, sinus thrombosis and Wallenberg's Syndrome, cerebral hemorrhage such as epidural hematoma, subdural hematoma and subarachnoid hemorrhage, cerebral infarction, cerebral ischemia such as transient cerebral ischemia, Subclavian Steal Syndrome and vertebrobasilar insufficiency, vascular dementia such as multi-infarct dementia, periventricular leukomalacia, vascular headache such as cluster headache and migraine.

[1678] Additional neurologic diseases which can be treated or detected with polynucleotides, polypeptides, agonists, and/or antagonists of the present invention include dementia such as AIDS Dementia Complex, presenile dementia such as Alzheimer's Disease and Creutzfeldt-Jakob Syndrome, senile dementia such as Alzheimer's Disease and progressive supranuclear palsy, vascular dementia such as multi-infarct dementia, encephalitis which include encephalitis periaxialis, viral encephalitis such as epidemic encephalitis, Japanese Encephalitis, St. Louis Encephalitis, tick-borne encephalitis and West Nile Fever, acute disseminated encephalomyelitis, meningoencephalitis such as uveomeningoencephalitic syndrome, Postencephalitic Parkinson Disease and subacute sclerosing panencephalitis, encephalomalacia such as periventricular leukomalacia, epilepsy such as generalized epilepsy which includes infantile spasms, absence epilepsy, myoclonic epilepsy which includes MERRF Syndrome, tonic-clonic epilepsy, partial epilepsy such as complex partial epilepsy, frontal lobe epilepsy and temporal lobe epilepsy, post-traumatic epilepsy, status epilepticus such as Epilepsia Partialis Continua, and Hallervorden-Spatz Syndrome.

[1679] Additional neurologic diseases which can be treated or detected with polynucleotides, polypeptides, agonists, and/or antagonists of the present invention include hydrocephalus such as Dandy-Walker Syndrome and normal pressure hydrocephalus, hypothalamic diseases such as hypothalamic neoplasms, cerebral malaria, narcolepsy which includes cataplexy, bulbar poliomyelitis, cerebri pseudotumor, Rett Syndrome, Reye's Syndrome, thalamic diseases, cerebral toxoplasmosis, intracranial tuberculoma and Zellweger Syndrome, central nervous system infections such as AIDS Dementia Complex, Brain Abscess, subdural empyema, encephalomyelitis such as Equine Encephalomyelitis, Venezuelan Equine Encephalomyelitis, Necrotizing Hemorrhagic Encephalomyelitis, Visna, and cerebral malaria.

[1680] Additional neurologic diseases which can be treated or detected with polynucleotides, polypeptides, agonists, and/or antagonists of the present invention include meningitis such as arachnoiditis, aseptic meningtitis such as viral meningtitis which includes lymphocytic choriomeningitis, Bacterial meningtitis which includes Haemophilus Meningtitis, Listeria Meningtitis, Meningococcal Meningtitis such as Waterhouse-Friderichsen Syndrome, Pneumococcal Meningtitis and meningeal tuberculosis, fungal meningitis such as Cryptococcal Meningtitis, subdural effusion, meningoencephalitis such as uvemeningoencephalitic syndrome, myelitis such as transverse myelitis, neurosyphilis such as tabes dorsalis, poliomyelitis which includes bulbar poliomyelitis and postpoliomyelitis syndrome, prion diseases (such as Creutzfeldt-Jakob Syndrome, Bovine Spongiform Encephalopathy, Gerstmann-Straussler Syndrome, Kuru, Scrapie), and cerebral toxoplasmosis.

[1681] Additional neurologic diseases which can be treated or detected with polynucleotides, polypeptides, agonists, and/or antagonists of the present invention include central nervous system neoplasms such as brain neoplasms that include cerebellar neoplasms such as infratentorial neoplasms, cerebral ventricle neoplasms such as choroid plexus neoplasms, hypothalamic neoplasms and supratentorial neoplasms, meningeal neoplasms, spinal cord neoplasms which include epidural neoplasms, demyelinating diseases such as Canavan Diseases, diffuse cerebral sceloris which includes adrenoleukodystrophy, encephalitis periaxialis, globoid cell leukodystrophy, diffuse cerebral sclerosis such as metachromatic leukodystrophy, allergic encephalomyelitis, necrotizing hemorrhagic encephalomyelitis, progressive multifocal leukoencephalopathy, multiple sclerosis, central pontine myelinolysis, transverse myelitis, neuromyelitis optica, Scrapie, Swayback, Chronic Fatigue Syndrome, Visna, High Pressure Nervous Syndrome, Meningism, spinal cord diseases such as amyotonia congenita, amyotrophic lateral sclerosis, spinal muscular atrophy such as Werdnig-Hoffmann Disease, spinal cord compression, spinal cord neoplasms such as epidural neoplasms, syringomyelia, Tabes Dorsalis, Stiff-Man Syndrome, mental retardation such as Angelman Syndrome, Cri-du-Chat Syndrome, De Lange's Syndrome, Down Syndrome, Gangliosidoses such as gangliosidoses G(M1), Sandhoff Disease, Tay-Sachs Disease, Hartnup Disease, homocystinuria, Laurence-Moon-Biedl Syndrome, Lesch-Nyhan Syndrome, Maple Syrup Urine Disease, mucolipidosis such as fucosidosis, neuronal ceroid-lipofuscinosis, oculocerebrorenal syndrome, phenylketonuria such as maternal phenylketonuria, Prader-Willi Syndrome, Rett Syndrome, Rubinstein-Taybi Syndrome, Tuberous Sclerosis, WAGR Syndrome, nervous system abnormalities such as holoprosencephaly, neural tube defects such as anencephaly which includes hydrangencephaly, Arnold-Chairi Deformity, encephalocele, meningocele, meningomyelocele, spinal dysraphism such as spina bifida cystica and spina bifida occulta.

[1682] Additional neurologic diseases which can be treated or detected with polynucleotides, polypeptides, agonists, and/or antagonists of the present invention include hereditary motor and sensory neuropathies which include Charcot-Marie Disease, Hereditary optic atrophy, Refsum's Disease, hereditary spastic paraplegia, Werdnig-Hoffmann Disease, Hereditary Sensory and Autonomic Neuropathies such as Congenital Analgesia and Familial Dysautonomia, Neurologic manifestations (such as agnosia that include Gerstmann's Syndrome, Amnesia such as retrograde amnesia, apraxia, neurogenic bladder, cataplexy, communicative disorders such as hearing disorders that includes deafness, partial hearing loss, loudness recruitment and tinnitus, language disorders such as aphasia which include agraphia, anomia, broca aphasia, and Wernicke Aphasia, Dyslexia such as Acquired Dyslexia, language development disorders, speech disorders such as aphasia which includes anomia, broca aphasia and Wernicke Aphasia, articulation disorders, communicative disorders such as speech disorders which include dysarthria, echolalia, mutism and stuttering, voice disorders such as aphonia and hoarseness, decerebrate state, delirium, fasciculation, hallucinations, meningism, movement disorders such as angelman syndrome, ataxia, athetosis, chorea, dystonia, hypokinesia, muscle hypotonia, myoclonus, tic, torticollis and tremor, muscle hypertonia such as muscle rigidity such as stiff-man syndrome, muscle spasticity, paralysis such as facial paralysis which includes Herpes Zoster Oticus, Gastroparesis, Hemiplegia, ophthalmoplegia such as diplopia, Duane's Syndrome, Horner's Syndrome, Chronic progressive external ophthalmoplegia such as Kearns Syndrome, Bulbar Paralysis, Tropical Spastic Paraparesis, Paraplegia such as Brown-Sequard Syndrome, quadriplegia, respiratory paralysis and vocal cord paralysis, paresis, phantom limb, taste disorders such as ageusia and dysgeusia, vision disorders such as amblyopia, blindness, color vision defects, diplopia, hemianopsia, scotoma and subnormal vision, sleep disorders such as hypersomnia which includes Kleine-Levin Syndrome, insomnia, and somnambulism, spasm such as trismus, unconsciousness such as coma, persistent vegetative state and syncope and vertigo, neuromuscular diseases such as amyotonia congenita, amyotrophic lateral sclerosis, Lambert-Eaton Myasthenic Syndrome, motor neuron disease, muscular atrophy such as spinal muscular atrophy, Charcot-Marie Disease and Werdnig-Hoffmann Disease, Postpoliomyelitis Syndrome, Muscular Dystrophy, Myasthenia Gravis, Myotonia Atrophica, Myotonia Confenita, Nemaline Myopathy, Familial Periodic Paralysis, Multiplex Paramyloclonus, Tropical Spastic Paraparesis and Stiff-Man Syndrome, peripheral nervous system diseases such as acrodynia, amyloid neuropathies, autonomic nervous system diseases such as Adie's Syndrome, Barre-Lieou Syndrome, Familial Dysautonomia, Horner's Syndrome, Reflex Sympathetic Dystrophy and Shy-Drager Syndrome, Cranial Nerve Diseases such as Acoustic Nerve Diseases such as Acoustic Neuroma which includes Neurofibromatosis 2, Facial Nerve Diseases such as Facial Neuralgia, Melkersson-Rosenthal Syndrome, ocular motility disorders which includes amblyopia, nystagmus, oculomotor nerve paralysis, ophthalmoplegia such as Duane's Syndrome, Horner's Syndrome, Chronic Progressive External Ophthalmoplegia which includes Kearns Syndrome, Strabismus such as Esotropia and Exotropia, Oculomotor Nerve Paralysis, Optic Nerve Diseases such as Optic Atrophy which includes Hereditary Optic Atrophy, Optic Disk Drusen, Optic Neuritis such as Neuromyelitis Optica, Papilledema, Trigeminal Neuralgia, Vocal Cord Paralysis, Demyelinating Diseases such as Neuromyelitis Optica and Swayback, and Diabetic neuropathies such as diabetic foot.

[1683] Additional neurologic diseases which can be treated or detected with polynucleotides, polypeptides, agonists, and/or antagonists of the present invention include nerve compression syndromes such as carpal tunnel syndrome, tarsal tunnel syndrome, thoracic outlet syndrome such as cervical rib syndrome, ulnar nerve compression syndrome, neuralgia such as causalgia, cervico-brachial neuralgia, facial neuralgia and trigeminal neuralgia, neuritis such as experimental allergic neuritis, optic neuritis, polyneuritis, polyradiculoneuritis and radiculities such as polyradiculitis, hereditary motor and sensory neuropathies such as Charcot-Marie Disease, Hereditary Optic Atrophy, Refsum's Disease, Hereditary Spastic Paraplegia and Werdnig-Hoffmann Disease, Hereditary Sensory and Autonomic Neuropathies which include Congenital Analgesia and Familial Dysautonomia, POEMS Syndrome, Sciatica, Gustatory Sweating and Tetany).

Endocrine Disorders

[1684] Polynucleotides or polypeptides, or agonists or antagonists of the present invention, may be used to treat, prevent, diagnose, and/or prognose disorders and/or diseases related to hormone imbalance, and/or disorders or diseases of the endocrine system.

[1685] Hormones secreted by the glands of the endocrine system control physical growth, sexual function, metabolism, and other functions. Disorders may be classified in two ways: disturbances in the production of hormones, and the inability of tissues to respond to hormones. The etiology of these hormone imbalance or endocrine system diseases, disorders or conditions may be genetic, somatic, such as cancer and some autoimmune diseases, acquired (e.g., by chemotherapy, injury or toxins), or infectious. Moreover, polynucleotides, polypeptides, antibodies, and/or agonists or antagonists of the present invention can be used as a marker or detector of a particular disease or disorder related to the endocrine system and/or hormone imbalance.

[1686] Endocrine system and/or hormone imbalance and/or diseases encompass disorders of uterine motility including, but not limited to: complications with pregnancy and labor (e.g., pre-term labor, post-term pregnancy, spontaneous abortion, and slow or stopped labor); and disorders and/or diseases of the menstrual cycle (e.g., dysmenorrhea and endometriosis).

[1687] Endocrine system and/or hormone imbalance disorders and/or diseases include disorders and/or diseases of the pancreas, such as, for example, diabetes mellitus, diabetes insipidus, congenital pancreatic agenesis, pheochromocytoma—islet cell tumor syndrome; disorders and/or diseases of the adrenal glands such as, for example, Addison's Disease, corticosteroid deficiency, virilizing disease, hirsutism, Cushing's Syndrome, hyperaldosteronism, pheochromocytoma; disorders and/or diseases of the pituitary gland, such as, for example, hyperpituitarism, hypopituitarism, pituitary dwarfism, pituitary adenoma, panhypopituitarism, acromegaly, gigantism; disorders and/or diseases of the thyroid, including but not limited to, hyperthyroidism, hypothyroidism, Plummer's disease, Graves' disease (toxic diffuse goiter), toxic nodular goiter, thyroiditis (Hashimoto's thyroiditis, subacute granulomatous thyroiditis, and silent lymphocytic thyroiditis), Pendred's syndrome, myxedema, cretinism, thyrotoxicosis, thyroid hormone coupling defect, thymic aplasia, Hurthle cell tumours of the thyroid, thyroid cancer, thyroid carcinoma, Medullary thyroid carcinoma; disorders and/or diseases of the parathyroid, such as, for example, hyperparathyroidism, hypoparathyroidism; disorders and/or diseases of the hypothalamus.

[1688] In addition, endocrine system and/or hormone imbalance disorders and/or diseases may also include disorders and/or diseases of the testes or ovaries, including cancer. Other disorders and/or diseases of the testes or ovaries further include, for example, ovarian cancer, polycystic ovary syndrome, Klinefelter's syndrome, vanishing testes syndrome (bilateral anorchia), congenital absence of Leydig's cells, cryptorchidism, Noonan's syndrome, myotonic dystrophy, capillary haemangioma of the testis (benign), neoplasias of the testis and neo-testis.

[1689] Moreover, endocrine system and/or hormone imbalance disorders and/or diseases may also include disorders and/or diseases such as, for example, polyglandular deficiency syndromes, pheochromocytoma, neuroblastoma, multiple Endocrine neoplasia, and disorders and/or cancers of endocrine tissues.

[1690] In another embodiment, a polypeptide of the invention, or polynucleotides, antibodies, agonists, or antagonists corresponding to that polypeptide, may be used to diagnose, prognose, prevent, and/or treat endocrine diseases and/or disorders associated with the tissue(s) in which the polypeptide of the invention is expressed, including one, two, three, four, five, or more tissues disclosed in Table 1B, column 8 (Tissue Distribution Library Code).

Reproductive System Disorders

[1691] The polynucleotides or polypeptides, or agonists or antagonists of the invention may be used for the diagnosis, treatment, or prevention of diseases and/or disorders of the reproductive system. Reproductive system disorders that can be treated by the compositions of the invention, include, but are not limited to, reproductive system injuries, infections, neoplastic disorders, congenital defects, and diseases or disorders which result in infertility, complications with pregnancy, labor, or parturition, and postpartum difficulties. Reproductive system disorders and/or diseases include diseases and/or disorders of the testes, including testicular atrophy, testicular feminization, cryptorchism (unilateral and bilateral), anorchia, ectopic testis, epididymitis and orchitis (typically resulting from infections such as, for example, gonorrhea, mumps, tuberculosis, and syphilis), testicular torsion, vasitis nodosa, germ cell tumors (e.g., seminomas, embryonal cell carcinomas, teratocarcinomas, choriocarcinomas, yolk sac tumors, and teratomas), stromal tumors (e.g., Leydig cell tumors), hydrocele, hematocele, varicocele, spermatocele, inguinal hernia, and disorders of sperm production (e.g., immotile cilia syndrome, aspermia, asthenozoospermia, azoospermia, oligospermia, and teratozoospermia).

[1692] Reproductive system disorders also include disorders of the prostate gland, such as acute non-bacterial prostatitis, chronic non-bacterial prostatitis, acute bacterial prostatitis, chronic bacterial prostatitis, prostatodystonia, prostatosis, granulomatous prostatitis, malacoplakia, benign prostatic hypertrophy or hyperplasia, and prostate neoplastic disorders, including adenocarcinomas, transitional cell carcinomas, ductal carcinomas, and squamous cell carcinomas.

[1693] Additionally, the compositions of the invention may be useful in the diagnosis, treatment, and/or prevention of disorders or diseases of the penis and urethra, including inflammatory disorders, such as balanoposthitis, balanitis xerotica obliterans, phimosis, paraphimosis, syphilis, herpes simplex virus, gonorrhea, non-gonococcal urethritis, chlamydia, mycoplasma, trichomonas, HIV, AIDS, Reiter's syndrome, condyloma acuminatum, condyloma latum, and pearly penile papules; urethral abnormalities, such as hypospadias, epispadias, and phimosis; premalignant lesions, including Erythroplasia of Queyrat, Bowen's disease, Bowenoid paplosis, giant condyloma of Buscke-Lowenstein, and varrucous carcinoma; penile cancers, including squamous cell carcinomas, carcinoma in situ, verrucous carcinoma, and disseminated penile carcinoma; urethral neoplastic disorders, including penile urethral carcinoma, bulbomembranous urethral carcinoma, and prostatic urethral carcinoma; and erectile disorders, such as priapism, Peyronie's disease, erectile dysfunction, and impotence.

[1694] Moreover, diseases and/or disorders of the vas deferens include vasculititis and CBAVD (congenital bilateral absence of the vas deferens); additionally, the polynucleotides, polypeptides, and agonists or antagonists of the present invention may be used in the diagnosis, treatment, and/or prevention of diseases and/or disorders of the seminal vesicles, including hydatid disease, congenital chloride diarrhea, and polycystic kidney disease.

[1695] Other disorders and/or diseases of the male reproductive system include, for example, Klinefelter's syndrome, Young's syndrome, premature ejaculation, diabetes mellitus, cystic fibrosis, Kartagener's syndrome, high fever, multiple sclerosis, and gynecomastia.

[1696] Further, the polynucleotides, polypeptides, and agonists or antagonists of the present invention may be used in the diagnosis, treatment, and/or prevention of diseases and/or disorders of the vagina and vulva, including bacterial vaginosis, candida vaginitis, herpes simplex virus, chancroid, granuloma inguinale, lymphogranuloma venereum, scabies, human papillomavirus, vaginal trauma, vulvar trauma, adenosis, chlamydia vaginitis, gonorrhea, trichomonas vaginitis, condyloma acuminatum, syphilis, molluscum contagiosum, atrophic vaginitis, Paget's disease, lichen sclerosus, lichen planus, vulvodynia, toxic shock syndrome, vaginismus, vulvovaginitis, vulvar vestibulitis, and neoplastic disorders, such as squamous cell hyperplasia, clear cell carcinoma, basal cell carcinoma, melanomas, cancer of Bartholin's gland, and vulvar intraepithelial neoplasia. Disorders and/or diseases of the uterus include dysmenorrhea, retroverted uterus, endometriosis, fibroids, adenomyosis, anovulatory bleeding, amenorrhea, Cushing's syndrome, hydatidiform moles, Asherman's syndrome, premature menopause, precocious puberty, uterine polyps, dysfunctional uterine bleeding (e.g., due to aberrant hormonal signals), and neoplastic disorders, such as adenocarcinomas, keiomyosarcomas, and sarcomas. Additionally, the polypeptides, polynucleotides, or agonists or antagonists of the invention may be useful as a marker or detector of, as well as in the diagnosis, treatment, and/or prevention of congenital uterine abnormalities, such as bicornuate uterus, septate uterus, simple unicornuate uterus, unicornuate uterus with a noncavitary rudimentary horn, unicornuate uterus with a non-communicating cavitary rudimentary horn, unicornuate uterus with a communicating cavitary horn, arcuate uterus, uterine didelfus, and T-shaped uterus.

[1697] Ovarian diseases and/or disorders include anovulation, polycystic ovary syndrome (Stein-Leventhal syndrome), ovarian cysts, ovarian hypofunction, ovarian insensitivity to gonadotropins, ovarian overproduction of androgens, right ovarian vein syndrome, amenorrhea, hirutism, and ovarian cancer (including, but not limited to, primary and secondary cancerous growth, Sertoli-Leydig tumors, endometriod carcinoma of the ovary, ovarian papillary serous adenocarcinoma, ovarian mucinous adenocarcinoma, and Ovarian Krukenberg tumors).

[1698] Cervical diseases and/or disorders include cervicitis, chronic cervicitis, mucopurulent cervicitis, cervical dysplasia, cervical polyps, Nabothian cysts, cervical erosion, cervical incompetence, and cervical neoplasms (including, for example, cervical carcinoma, squamous metaplasia, squamous cell carcinoma, adenosquamous cell neoplasia, and columnar cell neoplasia).

[1699] Additionally, diseases and/or disorders of the reproductive system include disorders and/or diseases of pregnancy, including miscarriage and stillbirth, such as early abortion, late abortion, spontaneous abortion, induced abortion, therapeutic abortion, threatened abortion, missed abortion, incomplete abortion, complete abortion, habitual abortion, missed abortion, and septic abortion; ectopic pregnancy, anemia, Rh incompatibility, vaginal bleeding during pregnancy, gestational diabetes, intrauterine growth retardation, polyhydramnios, HELLP syndrome, abruptio placentae, placenta previa, hyperemesis, preeclampsia, eclampsia, herpes gestationis, and urticaria of pregnancy. Additionally, the polynucleotides, polypeptides, and agonists or antagonists of the present invention may be used in the diagnosis, treatment, and/or prevention of diseases that can complicate pregnancy, including heart disease, heart failure, rheumatic heart disease, congenital heart disease, mitral valve prolapse, high blood pressure, anemia, kidney disease, infectious disease (e.g., rubella, cytomegalovirus, toxoplasmosis, infectious hepatitis, chlamydia, HIV, AIDS, and genital herpes), diabetes mellitus, Graves' disease, thyroiditis, hypothyroidism, Hashimoto's thyroiditis, chronic active hepatitis, cirrhosis of the liver, primary biliary cirrhosis, asthma, systemic lupus eryematosis, rheumatoid arthritis, myasthenia gravis, idiopathic thrombocytopenic purpura, appendicitis, ovarian cysts, gallbladder disorders, and obstruction of the intestine.

[1700] Complications associated with labor and parturition include premature rupture of the membranes, pre-term labor, post-term pregnancy, postmaturity, labor that progresses too slowly, fetal distress (e.g., abnormal heart rate (fetal or maternal), breathing problems, and abnormal fetal position), shoulder dystocia, prolapsed umbilical cord, amniotic fluid embolism, and aberrant uterine bleeding.

[1701] Further, diseases and/or disorders of the postdelivery period, including endometritis, myometritis, parametritis, peritonitis, pelvic thrombophlebitis, pulmonary embolism, endotoxemia, pyelonephritis, saphenous thrombophlebitis, mastitis, cystitis, postpartum hemorrhage, and inverted uterus.

[1702] Other disorders and/or diseases of the female reproductive system that may be diagnosed, treated, and/or prevented by the polynucleotides, polypeptides, and agonists or antagonists of the present invention include, for example, Turner's syndrome, pseudohermaphroditism, premenstrual syndrome, pelvic inflammatory disease, pelvic congestion (vascular engorgement), frigidity, anorgasmia, dyspareunia, ruptured fallopian tube, and Mittelschmerz.

Infectious Disease

[1703] Polynucleotides or polypeptides, as well as agonists or antagonists of the present invention can be used to treat or detect infectious agents. For example, by increasing the immune response, particularly increasing the proliferation and differentiation of B and/or T cells, infectious diseases may be treated. The immune response may be increased by either enhancing an existing immune response, or by initiating a new immune response. Alternatively, polynucleotides or polypeptides, as well as agonists or antagonists of the present invention may also directly inhibit the infectious agent, without necessarily eliciting an immune response.

[1704] Viruses are one example of an infectious agent that can cause disease or symptoms that can be treated or detected by a polynucleotide or polypeptide and/or agonist or antagonist of the present invention. Examples of viruses, include, but are not limited to Examples of viruses, include, but are not limited to the following DNA and RNA viruses and viral families: Arbovirus, Adenoviridae, Arenaviridae, Arterivirus, Birnaviridae, Bunyaviridae, Caliciviridae, Circoviridae, Coronaviridae, Dengue, EBV, HIV, Flaviviridae, Hepadnaviridae (Hepatitis), Herpesviridae (such as, Cytomegalovirus, Herpes Simplex, Herpes Zoster), Mononegavirus (e.g., Paramyxoviridae, Morbillivirus, Rhabdoviridae), Orthomyxoviridae (e.g., Influenza A, Influenza B, and parainfluenza), Papiloma virus, Papovaviridae, Parvoviridae, Picornaviridae, Poxyiridae (such as Smallpox or Vaccinia), Reoviridae (e.g., Rotavirus), Retroviridae (HTLV-I, HTLV-II, Lentivirus), and Togaviridae (e.g., Rubivirus). Viruses falling within these families can cause a variety of diseases or symptoms, including, but not limited to: arthritis, bronchiollitis, respiratory syncytial virus, encephalitis, eye infections (e.g., conjunctivitis, keratitis), chronic fatigue syndrome, hepatitis (A, B, C, E, Chronic Active, Delta), Japanese B encephalitis, Junin, Chikungunya, Rift Valley fever, yellow fever, meningitis, opportunistic infections (e.g., AIDS), pneumonia, Burkitt's Lymphoma, chickenpox, hemorrhagic fever, Measles, Mumps, Parainfluenza, Rabies, the common cold, Polio, leukemia, Rubella, sexually transmitted diseases, skin diseases (e.g., Kaposi's, warts), and viremia polynucleotides or polypeptides, or agonists or antagonists of the invention, can be used to treat or detect any of these symptoms or diseases. In specific embodiments, polynucleotides, polypeptides, or agonists or antagonists of the invention are used to treat: meningitis, Dengue, EBV, and/or hepatitis (e.g., hepatitis B). In an additional specific embodiment polynucleotides, polypeptides, or agonists or antagonists of the invention are used to treat patients nonresponsive to one or more other commercially available hepatitis vaccines. In a further specific embodiment polynucleotides, polypeptides, or agonists or antagonists of the invention are used to treat AIDS.

[1705] Similarly, bacterial and fungal agents that can cause disease or symptoms and that can be treated or detected by a polynucleotide or polypeptide and/or agonist or antagonist of the present invention include, but not limited to, the following Gram-Negative and Gram-positive bacteria, bacterial families, and fungi: Actinomyces (e.g., Norcardia), Acinetobacter, Cryptococcus neoformans, Aspergillus, Bacillaceae (e.g., Bacillus anthrasis), Bacteroides (e.g., Bacteroides fragilis), Blastomycosis, Bordetella, Borrelia (e.g., Borrelia burgdorferi), Brucella, Candidia, Campylobacter, Chlamydia, Clostridium (e.g., Clostridium botulinum, Clostridium dificile, Clostridium perfringens, Clostridium tetani), Coccidioides, Corynebacterium (e.g., Corynebacterium diptheriae), Cryptococcus, Dermatocycoses, E. coli (e.g., Enterotoxigenic E. coli and Enterohemorrhagic E. coli), Enterobacter (e.g. Enterobacter aerogenes), Enterobacteriaceae (Klebsiella, Salmonella (e.g., Salmonella typhi, Salmonella enteritidis, Salmonella typhi), Serratia, Yersinia, Shigella), Erysipelothrix, Haemophilus (e.g., Haemophilus influenza type B), Helicobacter, Legionella (e.g., Legionella pneumophila), Leptospira, Listeria (e.g., Listeria monocytogenes), Mycoplasma, Mycobacterium (e.g., Mycobacterium leprae and Mycobacterium tuberculosis), Vibrio (e.g., Vibrio cholerae), Neisseriaceae (e.g., Neisseria gonorrhea, Neisseria meningitidis), Pasteurellacea, Proteus, Pseudomonas (e.g., Pseudomonas aeruginosa), Rickettsiaceae, Spirochetes (e.g., Treponema spp., Leptospira spp., Borrelia spp.), Shigella spp., Staphylococcus (e.g., Staphylococcus aureus), Meningiococcus, Pneumococcus and Streptococcus (e.g., Streptococcus pneumoniae and Groups A, B, and C Streptococci), and Ureaplasmas. These bacterial, parasitic, and fungal families can cause diseases or symptoms, including, but not limited to: antibiotic-resistant infections, bacteremia, endocarditis, septicemia, eye infections (e.g., conjunctivitis), uveitis, tuberculosis, gingivitis, bacterial diarrhea, opportunistic infections (e.g., AIDS related infections), paronychia, prosthesis-related infections, dental caries, Reiter's Disease, respiratory tract infections, such as Whooping Cough or Empyema, sepsis, Lyme Disease, Cat-Scratch Disease, dysentery, paratyphoid fever, food poisoning, Legionella disease, chronic and acute inflammation, erythema, yeast infections, typhoid, pneumonia, gonorrhea, meningitis (e.g., mengitis types A and B), chlamydia, syphillis, diphtheria, leprosy, brucellosis, peptic ulcers, anthrax, spontaneous abortions, birth defects, pneumonia, lung infections, ear infections, deafness, blindness, lethargy, malaise, vomiting, chronic diarrhea, Crohn's disease, colitis, vaginosis, sterility, pelvic inflammatory diseases, candidiasis, paratuberculosis, tuberculosis, lupus, botulism, gangrene, tetanus, impetigo, Rheumatic Fever, Scarlet Fever, sexually transmitted diseases, skin diseases (e.g., cellulitis, dermatocycoses), toxemia, urinary tract infections, wound infections, noscomial infections. Polynucleotides or polypeptides, agonists or antagonists of the invention, can be used to treat or detect any of these symptoms or diseases. In specific embodiments, polynucleotides, polypeptides, agonists or antagonists of the invention are used to treat: tetanus, diptheria, botulism, and/or meningitis type B.

[1706] Moreover, parasitic agents causing disease or symptoms that can be treated, prevented, and/or diagnosed by a polynucleotide or polypeptide and/or agonist or antagonist of the present invention include, but not limited to, the following families or class: Amebiasis, Babesiosis, Coccidiosis, Cryptosporidiosis, Dientamoebiasis, Dourine, Ectoparasitic, Giardias, Helminthiasis, Leishmaniasis, Schistisoma, Theileriasis, Toxoplasmosis, Trypanosomiasis, and Trichomonas and Sporozoans (e.g., Plasmodium virax, Plasmodium falciparium, Plasmodium malariae and Plasmodium ovale). These parasites can cause a variety of diseases or symptoms, including, but not limited to: Scabies, Trombiculiasis, eye infections, intestinal disease (e.g., dysentery, giardiasis), liver disease, lung disease, opportunistic infections (e.g., AIDS related), malaria, pregnancy complications, and toxoplasmosis. polynucleotides or polypeptides, or agonists or antagonists of the invention, can be used to treat, prevent, and/or diagnose any of these symptoms or diseases. In specific embodiments, polynucleotides, polypeptides, or agonists or antagonists of the invention are used to treat, prevent, and/or diagnose malaria.

[1707] Polynucleotides or polypeptides, as well as agonists or antagonists of the present invention of the present invention could either be by administering an effective amount of a polypeptide to the patient, or by removing cells from the patient, supplying the cells with a polynucleotide of the present invention, and returning the engineered cells to the patient (ex vivo therapy). Moreover, the polypeptide or polynucleotide of the present invention can be used as an antigen in a vaccine to raise an immune response against infectious disease.

Regeneration

[1708] Polynucleotides or polypeptides, as well as agonists or antagonists of the present invention can be used to differentiate, proliferate, and attract cells, leading to the regeneration of tissues. (See, Science 276:59-87 (1997)). The regeneration of tissues could be used to repair, replace, or protect tissue damaged by congenital defects, trauma (wounds, burns, incisions, or ulcers), age, disease (e.g. osteoporosis, osteocarthritis, periodontal disease, liver failure), surgery, including cosmetic plastic surgery, fibrosis, reperfusion injury, or systemic cytokine damage.

[1709] Tissues that could be regenerated using the present invention include organs (e.g., pancreas, liver, intestine, kidney, skin, endothelium), muscle (smooth, skeletal or cardiac), vasculature (including vascular and lymphatics), nervous, hematopoietic, and skeletal (bone, cartilage, tendon, and ligament) tissue. Preferably, regeneration occurs without or decreased scarring. Regeneration also may include angiogenesis.

[1710] Moreover, polynucleotides or polypeptides, as well as agonists or antagonists of the present invention, may increase regeneration of tissues difficult to heal. For example, increased tendon/ligament regeneration would quicken recovery time after damage. Polynucleotides or polypeptides, as well as agonists or antagonists of the present invention could also be used prophylactically in an effort to avoid damage. Specific diseases that could be treated include of tendinitis, carpal tunnel syndrome, and other tendon or ligament defects. A further example of tissue regeneration of non-healing wounds includes pressure ulcers, ulcers associated with vascular insufficiency, surgical, and traumatic wounds.

[1711] Similarly, nerve and brain tissue could also be regenerated by using polynucleotides or polypeptides, as well as agonists or antagonists of the present invention, to proliferate and differentiate nerve cells. Diseases that could be treated using this method include central and peripheral nervous system diseases, neuropathies, or mechanical and traumatic disorders (e.g., spinal cord disorders, head trauma, cerebrovascular disease, and stoke). Specifically, diseases associated with peripheral nerve injuries, peripheral neuropathy (e.g., resulting from chemotherapy or other medical therapies), localized neuropathies, and central nervous system diseases (e.g., Alzheimer's disease, Parkinson's disease, Huntington's disease, amyotrophic lateral sclerosis, and Shy-Drager syndrome), could all be treated using the polynucleotides or polypeptides, as well as agonists or antagonists of the present invention.

Gastrointestinal Disorders

[1712] Polynucleotides or polypeptides, or agonists or antagonists of the present invention, may be used to treat, prevent, diagnose, and/or prognose gastrointestinal disorders, including inflammatory diseases and/or conditions, infections, cancers (e.g., intestinal neoplasms (carcinoid tumor of the small intestine, non-Hodgkin's lymphoma of the small intestine, small bowl lymphoma)), and ulcers, such as peptic ulcers.

[1713] Gastrointestinal disorders include dysphagia, odynophagia, inflammation of the esophagus, peptic esophagitis, gastric reflux, submucosal fibrosis and stricturing, Mallory-Weiss lesions, leiomyomas, lipomas, epidermal cancers, adeoncarcinomas, gastric retention disorders, gastroenteritis, gastric atrophy, gastric/stomach cancers, polyps of the stomach, autoimmune disorders such as pernicious anemia, pyloric stenosis, gastritis (bacterial, viral, eosinophilic, stress-induced, chronic erosive, atrophic, plasma cell, and Ménétrier's), and peritoneal diseases (e.g., chyloperioneum, hemoperitoneum, mesenteric cyst, mesenteric lymphadenitis, mesenteric vascular occlusion, panniculitis, neoplasms, peritonitis, pneumoperitoneum, bubphrenic abscess,).

[1714] Gastrointestinal disorders also include disorders associated with the small intestine, such as malabsorption syndromes, distension, irritable bowel syndrome, sugar intolerance, celiac disease, duodenal ulcers, duodenitis, tropical sprue, Whipple's disease, intestinal lymphangiectasia, Crohn's disease, appendicitis, obstructions of the ileum, Meckel's diverticulum, multiple diverticula, failure of complete rotation of the small and large intestine, lymphoma, and bacterial and parasitic diseases (such as Traveler's diarrhea, typhoid and paratyphoid, cholera, infection by Roundworms (Ascariasis lumbricoides), Hookworms (Ancylostoma duodenale), Threadworms (Enterobius vermicularis), Tapeworms (Taenia saginata, Echinococcus granulosus, Diphyllobothrium spp., and T. solium).

[1715] Liver diseases and/or disorders include intrahepatic cholestasis (alagille syndrome, biliary liver cirrhosis), fatty liver (alcoholic fatty liver, reye syndrome), hepatic vein thrombosis, hepatolentricular degeneration, hepatomegaly, hepatopulmonary syndrome, hepatorenal syndrome, portal hypertension (esophageal and gastric varices), liver abscess (amebic liver abscess), liver cirrhosis (alcoholic, biliary and experimental), alcoholic liver diseases (fatty liver, hepatitis, cirrhosis), parasitic (hepatic echinococcosis, fascioliasis, amebic liver abscess), jaundice (hemolytic, hepatocellular, and cholestatic), cholestasis, portal hypertension, liver enlargement, ascites, hepatitis (alcoholic hepatitis, animal hepatitis, chronic hepatitis (autoimmune, hepatitis B, hepatitis C, hepatitis D, drug induced), toxic hepatitis, viral human hepatitis (hepatitis A, hepatitis B, hepatitis C, hepatitis D, hepatitis E), Wilson's disease, granulomatous hepatitis, secondary biliary cirrhosis, hepatic encephalopathy, portal hypertension, varices, hepatic encephalopathy, primary biliary cirrhosis, primary sclerosing cholangitis, hepatocellular adenoma, hemangiomas, bile stones, liver failure (hepatic encephalopathy, acute liver failure), and liver neoplasms (angiomyolipoma, calcified liver metastases, cystic liver metastases, epithelial tumors, fibrolamellar hepatocarcinoma, focal nodular hyperplasia, hepatic adenoma, hepatobiliary cystadenoma, hepatoblastoma, hepatocellular carcinoma, hepatoma, liver cancer, liver hemangioendothelioma, mesenchymal hamartoma, mesenchymal tumors of liver, nodular regenerative hyperplasia, benign liver tumors (Hepatic cysts [Simple cysts, Polycystic liver disease, Hepatobiliary cystadenoma, Choledochal cyst], Mesenchymal tumors [Mesenchymal hamartoma, Infantile hemangioendothelioma, Hemangioma, Peliosis hepatis, Lipomas, Inflammatory pseudotumor, Miscellaneous], Epithelial tumors [Bile duct epithelium (Bile duct hamartoma, Bile duct adenoma), Hepatocyte (Adenoma, Focal nodular hyperplasia, Nodular regenerative hyperplasia)], malignant liver tumors [hepatocellular, hepatoblastoma, hepatocellular carcinoma, cholangiocellular, cholangiocarcinoma, cystadenocarcinoma, tumors of blood vessels, angiosarcoma, Karposi's sarcoma, hemangioendothelioma, other tumors, embryonal sarcoma, fibrosarcoma, leiomyosarcoma, rhabdomyosarcoma, carcinosarcoma, teratoma, carcinoid, squamous carcinoma, primary lymphoma]), peliosis hepatis, erythrohepatic porphyria, hepatic porphyria (acute intermittent porphyria, porphyria cutanea tarda), Zellweger syndrome).

[1716] Pancreatic diseases and/or disorders include acute pancreatitis, chronic pancreatitis (acute necrotizing pancreatitis, alcoholic pancreatitis), neoplasms (adenocarcinoma of the pancreas, cystadenocarcinoma, insulinoma, gastrinoma, and glucagonoma, cystic neoplasms, islet-cell tumors, pancreoblastoma), and other pancreatic diseases (e.g., cystic fibrosis, cyst (pancreatic pseudocyst, pancreatic fistula, insufficiency)).

[1717] Gallbladder diseases include gallstones (cholelithiasis and choledocholithiasis), postcholecystectomy syndrome, diverticulosis of the gallbladder, acute cholecystitis, chronic cholecystitis, bile duct tumors, and mucocele.

[1718] Diseases and/or disorders of the large intestine include antibiotic-associated colitis, diverticulitis, ulcerative colitis, acquired megacolon, abscesses, fungal and bacterial infections, anorectal disorders (e.g., fissures, hemorrhoids), colonic diseases (colitis, colonic neoplasms [colon cancer, adenomatous colon polyps (e.g., villous adenoma), colon carcinoma, colorectal cancer], colonic diverticulitis, colonic diverticulosis, megacolon [Hirschsprung disease, toxic megacolon]; sigmoid diseases [proctocolitis, sigmoin neoplasms]), constipation, Crohn's disease, diarrhea (infantile diarrhea, dysentery), duodenal diseases (duodenal neoplasms, duodenal obstruction, duodenal ulcer, duodenitis), enteritis (enterocolitis), HIV enteropathy, ileal diseases (ileal neoplasms, ileitis), immunoproliferative small intestinal disease, inflammatory bowel disease (ulcerative colitis, Crohn's disease), intestinal atresia, parasitic diseases (anisakiasis, balantidiasis, blastocystis infections, cryptosporidiosis, dientamoebiasis, amebic dysentery, giardiasis), intestinal fistula (rectal fistula), intestinal neoplasms (cecal neoplasms, colonic neoplasms, duodenal neoplasms, ileal neoplasms, intestinal polyps, jejunal neoplasms, rectal neoplasms), intestinal obstruction (afferent loop syndrome, duodenal obstruction, impacted feces, intestinal pseudo-obstruction [cecal volvulus], intussusception), intestinal perforation, intestinal polyps (colonic polyps, gardner syndrome, peutz-jeghers syndrome), jejunal diseases (jejunal neoplasms), malabsorption syndromes (blind loop syndrome, celiac disease, lactose intolerance, short bowl syndrome, tropical sprue, whipple's disease), mesenteric vascular occlusion, pneumatosis cystoides intestinalis, protein-losing enteropathies (intestinal lymphagiectasis), rectal diseases (anus diseases, fecal incontinence, hemorrhoids, proctitis, rectal fistula, rectal prolapse, rectocele), peptic ulcer (duodenal ulcer, peptic esophagitis, hemorrhage, perforation, stomach ulcer, Zollinger-Ellison syndrome), postgastrectomy syndromes (dumping syndrome), stomach diseases (e.g., achlorhydria, duodenogastric reflux (bile reflux), gastric antral vascular ectasia, gastric fistula, gastric outlet obstruction, gastritis (atrophic or hypertrophic), gastroparesis, stomach dilatation, stomach diverticulum, stomach neoplasms (gastric cancer, gastric polyps, gastric adenocarcinoma, hyperplastic gastric polyp), stomach rupture, stomach ulcer, stomach volvulus), tuberculosis, visceroptosis, vomiting (e.g., hematemesis, hyperemesis gravidarum, postoperative nausea and vomiting) and hemorrhagic colitis.

[1719] Further diseases and/or disorders of the gastrointestinal system include biliary tract diseases, such as, gastroschisis, fistula (e.g., biliary fistula, esophageal fistula, gastric fistula, intestinal fistula, pancreatic fistula), neoplasms (e.g., biliary tract neoplasms, esophageal neoplasms, such as adenocarcinoma of the esophagus, esophageal squamous cell carcinoma, gastrointestinal neoplasms, pancreatic neoplasms, such as adenocarcinoma of the pancreas, mucinous cystic neoplasm of the pancreas, pancreatic cystic neoplasms, pancreatoblastoma, and peritoneal neoplasms), esophageal disease (e.g., bullous diseases, candidiasis, glycogenic acanthosis, ulceration, barrett esophagus varices, atresia, cyst, diverticulum (e.g., Zenker's diverticulum), fistula (e.g., tracheoesophageal fistula), motility disorders (e.g., CREST syndrome, deglutition disorders, achalasia, spasm, gastroesophageal reflux), neoplasms, perforation (e.g., Boerhaave syndrome, Mallory-Weiss syndrome), stenosis, esophagitis, diaphragmatic hernia (e.g., hiatal hernia); gastrointestinal diseases, such as, gastroenteritis (e.g., cholera morbus, norwalk virus infection), hemorrhage (e.g., hematemesis, melena, peptic ulcer hemorrhage), stomach neoplasms (gastric cancer, gastric polyps, gastric adenocarcinoma, stomach cancer)), hernia (e.g., congenital diaphragmatic hernia, femoral hernia, inguinal hernia, obturator hernia, umbilical hernia, ventral hernia), and intestinal diseases (e.g., cecal diseases (appendicitis, cecal neoplasms)).

Chemotaxis

[1720] Polynucleotides or polypeptides, as well as agonists or antagonists of the present invention may have chemotaxis activity. A chemotaxic molecule attracts or mobilizes cells (e.g., monocytes, fibroblasts, neutrophils, T-cells, mast cells, eosinophils, epithelial and/or endothelial cells) to a particular site in the body, such as inflammation, infection, or site of hyperproliferation. The mobilized cells can then fight off and/or heal the particular trauma or abnormality.

[1721] Polynucleotides or polypeptides, as well as agonists or antagonists of the present invention may increase chemotaxic activity of particular cells. These chemotactic molecules can then be used to treat inflammation, infection, hyperproliferative disorders, or any immune system disorder by increasing the number of cells targeted to a particular location in the body. For example, chemotaxic molecules can be used to treat wounds and other trauma to tissues by attracting immune cells to the injured location. Chemotactic molecules of the present invention can also attract fibroblasts, which can be used to treat wounds.

[1722] It is also contemplated that polynucleotides or polypeptides, as well as agonists or antagonists of the present invention may inhibit chemotactic activity. These molecules could also be used to treat disorders. Thus, polynucleotides or polypeptides, as well as agonists or antagonists of the present invention could be used as an inhibitor of chemotaxis.

Binding Activity

[1723] A polypeptide of the present invention may be used to screen for molecules that bind to the polypeptide or for molecules to which the polypeptide binds. The binding of the polypeptide and the molecule may activate (agonist), increase, inhibit (antagonist), or decrease activity of the polypeptide or the molecule bound. Examples of such molecules include antibodies, oligonucleotides, proteins (e.g., receptors), or small molecules.

[1724] Preferably, the molecule is closely related to the natural ligand of the polypeptide, e.g., a fragment of the ligand, or a natural substrate, a ligand, a structural or functional mimetic. (See, Coligan et al., Current Protocols in Immunology 1(2):Chapter 5 (1991)). Similarly, the molecule can be closely related to the natural receptor to which the polypeptide binds, or at least, a fragment of the receptor capable of being bound by the polypeptide (e.g., active site). In either case, the molecule can be rationally designed using known techniques.

[1725] Preferably, the screening for these molecules involves producing appropriate cells which express the polypeptide. Preferred cells include cells from mammals, yeast, Drosophila, or E. coli. Cells expressing the polypeptide (or cell membrane containing the expressed polypeptide) are then preferably contacted with a test compound potentially containing the molecule to observe binding, stimulation, or inhibition of activity of either the polypeptide or the molecule.

[1726] The assay may simply test binding of a candidate compound to the polypeptide, wherein binding is detected by a label, or in an assay involving competition with a labeled competitor. Further, the assay may test whether the candidate compound results in a signal generated by binding to the polypeptide.

[1727] Alternatively, the assay can be carried out using cell-free preparations, polypeptide/molecule affixed to a solid support, chemical libraries, or natural product mixtures. The assay may also simply comprise the steps of mixing a candidate compound with a solution containing a polypeptide, measuring polypeptide/molecule activity or binding, and comparing the polypeptide/molecule activity or binding to a standard.

[1728] Preferably, an ELISA assay can measure polypeptide level or activity in a sample (e.g., biological sample) using a monoclonal or polyclonal antibody. The antibody can measure polypeptide level or activity by either binding, directly or indirectly, to the polypeptide or by competing with the polypeptide for a substrate.

[1729] Additionally, the receptor to which the polypeptide of the present invention binds can be identified by numerous methods known to those of skill in the art, for example, ligand panning and FACS sorting (Coligan, et al., Current Protocols in Immun., 1(2), Chapter 5, (1991)). For example, expression cloning is employed wherein polyadenylated RNA is prepared from a cell responsive to the polypeptides, for example, NIH3T3 cells which are known to contain multiple receptors for the FGF family proteins, and SC-3 cells, and a cDNA library created from this RNA is divided into pools and used to transfect COS cells or other cells that are not responsive to the polypeptides. Transfected cells which are grown on glass slides are exposed to the polypeptide of the present invention, after they have been labeled. The polypeptides can be labeled by a variety of means including iodination or inclusion of a recognition site for a site-specific protein kinase.

[1730] Following fixation and incubation, the slides are subjected to auto-radiographic analysis. Positive pools are identified and sub-pools are prepared and re-transfected using an iterative sub-pooling and re-screening process, eventually yielding a single clones that encodes the putative receptor.

[1731] As an alternative approach for receptor identification, the labeled polypeptides can be photoaffinity linked with cell membrane or extract preparations that express the receptor molecule. Cross-linked material is resolved by PAGE analysis and exposed to X-ray film. The labeled complex containing the receptors of the polypeptides can be excised, resolved into peptide fragments, and subjected to protein microsequencing. The amino acid sequence obtained from microsequencing would be used to design a set of degenerate oligonucleotide probes to screen a cDNA library to identify the genes encoding the putative receptors.

[1732] Moreover, the techniques of gene-shuffling, motif-shuffling, exon-shuffling, and/or codon-shuffling (collectively referred to as “DNA shuffling”) may be employed to modulate the activities of the polypeptide of the present invention thereby effectively generating agonists and antagonists of the polypeptide of the present invention. See generally, U.S. Pat. Nos. 5,605,793, 5,811,238, 5,830,721, 5,834,252, and 5,837,458, and Patten, P. A., et al., Curr. Opinion Biotechnol. 8:724-33 (1997); Harayama, S. Trends Biotechnol. 16(2):76-82 (1998); Hansson, L. O., et al., J. Mol. Biol. 287:265-76 (1999); and Lorenzo, M. M. and Blasco, R. Biotechniques 24(2):308-13 (1998); each of these patents and publications are hereby incorporated by reference). In one embodiment, alteration of polynucleotides and corresponding polypeptides may be achieved by DNA shuffling. DNA shuffling involves the assembly of two or more DNA segments into a desired molecule by homologous, or site-specific, recombination. In another embodiment, polynucleotides and corresponding polypeptides may be altered by being subjected to random mutagenesis by error-prone PCR, random nucleotide insertion or other methods prior to recombination. In another embodiment, one or more components, motifs, sections, parts, domains, fragments, etc., of the polypeptide of the present invention may be recombined with one or more components, motifs, sections, parts, domains, fragments, etc. of one or more heterologous molecules. In preferred embodiments, the heterologous molecules are family members. In further preferred embodiments, the heterologous molecule is a growth factor such as, for example, platelet-derived growth factor (PDGF), insulin-like growth factor (IGF-I), transforming growth factor (TGF)-alpha, epidermal growth factor (EGF), fibroblast growth factor (FGF), TGF-beta, bone morphogenetic protein (BMP)-2, BMP-4, BMP-5, BMP-6, BMP-7, activins A and B, decapentaplegic (dpp), 60A, OP-2, dorsalin, growth differentiation factors (GDFs), nodal, MIS, inhibin-alpha, TGF-beta1, TGF-beta2, TGF-beta3, TGF-beta5, and glial-derived neurotrophic factor (GDNF).

[1733] Other preferred fragments are biologically active fragments of the polypeptide of the present invention. Biologically active fragments are those exhibiting activity similar, but not necessarily identical, to an activity of the polypeptide of the present invention. The biological activity of the fragments may include an improved desired activity, or a decreased undesirable activity.

[1734] Additionally, this invention provides a method of screening compounds to identify those which modulate the action of the polypeptide of the present invention. An example of such an assay comprises combining a mammalian fibroblast cell, a the polypeptide of the present invention, the compound to be screened and ³[H] thymidine under cell culture conditions where the fibroblast cell would normally proliferate. A control assay may be performed in the absence of the compound to be screened and compared to the amount of fibroblast proliferation in the presence of the compound to determine if the compound stimulates proliferation by determining the uptake of ³[H] thymidine in each case. The amount of fibroblast cell proliferation is measured by liquid scintillation chromatography which measures the incorporation of ³ [H] thymidine. Both agonist and antagonist compounds may be identified by this procedure.

[1735] In another method, a mammalian cell or membrane preparation expressing a receptor for a polypeptide of the present invention is incubated with a labeled polypeptide of the present invention in the presence of the compound. The ability of the compound to enhance or block this interaction could then be measured. Alternatively, the response of a known second messenger system following interaction of a compound to be screened and the receptor is measured and the ability of the compound to bind to the receptor and elicit a second messenger response is measured to determine if the compound is a potential agonist or antagonist. Such second messenger systems include but are not limited to, cAMP guanylate cyclase, ion channels or phosphoinositide hydrolysis.

[1736] All of these above assays can be used as diagnostic or prognostic markers. The molecules discovered using these assays can be used to treat disease or to bring about a particular result in a patient (e.g., blood vessel growth) by activating or inhibiting the polypeptide/molecule. Moreover, the assays can discover agents which may inhibit or enhance the production of the polypeptides of the invention from suitably manipulated cells or tissues.

[1737] Therefore, the invention includes a method of identifying compounds which bind to a polypeptide of the invention comprising the steps of: (a) incubating a candidate binding compound with a polypeptide of the present invention; and (b) determining if binding has occurred. Moreover, the invention includes a method of identifying agonists/antagonists comprising the steps of: (a) incubating a candidate compound with a polypeptide of the present invention, (b) assaying a biological activity, and (b) determining if a biological activity of the polypeptide has been altered.

Targeted Delivery

[1738] In another embodiment, the invention provides a method of delivering compositions to targeted cells expressing a receptor for a polypeptide of the invention, or cells expressing a cell bound form of a polypeptide of the invention.

[1739] As discussed herein, polypeptides or antibodies of the invention may be associated with heterologous polypeptides, heterologous nucleic acids, toxins, or prodrugs via hydrophobic, hydrophilic, ionic and/or covalent interactions. In one embodiment, the invention provides a method for the specific delivery of compositions of the invention to cells by administering polypeptides of the invention (including antibodies) that are associated with heterologous polypeptides or nucleic acids. In one example, the invention provides a method for delivering a therapeutic protein into the targeted cell. In another example, the invention provides a method for delivering a single stranded nucleic acid (e.g., antisense or ribozymes) or double stranded nucleic acid (e.g., DNA that can integrate into the cell's genome or replicate episomally and that can be transcribed) into the targeted cell.

[1740] In another embodiment, the invention provides a method for the specific destruction of cells (e.g., the destruction of tumor cells) by administering polypeptides of the invention (e.g., polypeptides of the invention or antibodies of the invention) in association with toxins or cytotoxic prodrugs.

[1741] By “toxin” is meant compounds that bind and activate endogenous cytotoxic effector systems, radioisotopes, holotoxins, modified toxins, catalytic subunits of toxins, or any molecules or enzymes not normally present in or on the surface of a cell that under defined conditions cause the cell's death. Toxins that may be used according to the methods of the invention include, but are not limited to, radioisotopes known in the art, compounds such as, for example, antibodies (or complement fixing containing portions thereof) that bind an inherent or induced endogenous cytotoxic effector system, thymidine kinase, endonuclease, RNAse, alpha toxin, ricin, abrin, Pseudomonas exotoxin A, diphtheria toxin, saporin, momordin, gelonin, pokeweed antiviral protein, alpha-sarcin and cholera toxin. By “cytotoxic prodrug” is meant a non-toxic compound that is converted by an enzyme, normally present in the cell, into a cytotoxic compound. Cytotoxic prodrugs that may be used according to the methods of the invention include, but are not limited to, glutamyl derivatives of benzoic acid mustard alkylating agent, phosphate derivatives of etoposide or mitomycin C, cytosine arabinoside, daunorubisin, and phenoxyacetamide derivatives of doxorubicin.

Drug Screening

[1742] Further contemplated is the use of the polypeptides of the present invention, or the polynucleotides encoding these polypeptides, to screen for molecules which modify the activities of the polypeptides of the present invention. Such a method would include contacting the polypeptide of the present invention with a selected compound(s) suspected of having antagonist or agonist activity, and assaying the activity of these polypeptides following binding.

[1743] This invention is particularly useful for screening therapeutic compounds by using the polypeptides of the present invention, or binding fragments thereof, in any of a variety of drug screening techniques. The polypeptide or fragment employed in such a test may be affixed to a solid support, expressed on a cell surface, free in solution, or located intracellularly. One method of drug screening utilizes eukaryotic or prokaryotic host cells which are stably transformed with recombinant nucleic acids expressing the polypeptide or fragment. Drugs are screened against such transformed cells in competitive binding assays. One may measure, for example, the formulation of complexes between the agent being tested and a polypeptide of the present invention.

[1744] Thus, the present invention provides methods of screening for drugs or any other agents which affect activities mediated by the polypeptides of the present invention. These methods comprise contacting such an agent with a polypeptide of the present invention or a fragment thereof and assaying for the presence of a complex between the agent and the polypeptide or a fragment thereof, by methods well known in the art. In such a competitive binding assay, the agents to screen are typically labeled. Following incubation, free agent is separated from that present in bound form, and the amount of free or uncomplexed label is a measure of the ability of a particular agent to bind to the polypeptides of the present invention.

[1745] Another technique for drug screening provides high throughput screening for compounds having suitable binding affinity to the polypeptides of the present invention, and is described in great detail in European Patent Application 84/03564, published on Sep. 13, 1984, which is incorporated herein by reference herein. Briefly stated, large numbers of different small peptide test compounds are synthesized on a solid substrate, such as plastic pins or some other surface. The peptide test compounds are reacted with polypeptides of the present invention and washed. Bound polypeptides are then detected by methods well known in the art. Purified polypeptides are coated directly onto plates for use in the aforementioned drug screening techniques. In addition, non-neutralizing antibodies may be used to capture the peptide and immobilize it on the solid support.

[1746] This invention also contemplates the use of competitive drug screening assays in which neutralizing antibodies capable of binding polypeptides of the present invention specifically compete with a test compound for binding to the polypeptides or fragments thereof. In this manner, the antibodies are used to detect the presence of any peptide which shares one or more antigenic epitopes with a polypeptide of the invention.

Antisense and Ribozyme (Antagonists)

[1747] In specific embodiments, antagonists according to the present invention are nucleic acids corresponding to the sequences contained in SEQ ID NO:X, or the complementary strand thereof, and/or to cDNA sequences contained in cDNA ATCC Deposit No:Z identified for example, in Table 1A and/or 1B. In one embodiment, antisense sequence is generated internally, by the organism, in another embodiment, the antisense sequence is separately administered (see, for example, O'Connor, J., Neurochem. 56:560 (1991). Oligodeoxynucleotides as Antisense Inhibitors of Gene Expression, CRC Press, Boca Raton, Fla. (1988). Antisense technology can be used to control gene expression through antisense DNA or RNA, or through triple-helix formation. Antisense techniques are discussed for example, in Okano, J., Neurochem. 56:560 (1991); Oligodeoxynucleotides as Antisense Inhibitors of Gene Expression, CRC Press, Boca Raton, Fla. (1988). Triple helix formation is discussed in, for instance, Lee et al., Nucleic Acids Research 6:3073 (1979); Cooney et al., Science 241:456 (1988); and Dervan et al., Science 251:1300 (1991). The methods are based on binding of a polynucleotide to a complementary DNA or RNA.

[1748] For example, the use of c-myc and c-myb antisense RNA constructs to inhibit the growth of the non-lymphocytic leukemia cell line HL-60 and other cell lines was previously described. (Wickstrom et al. (1988); Anfossi et al. (1989)). These experiments were performed in vitro by incubating cells with the oligoribonucleotide. A similar procedure for in vivo use is described in WO 91/15580. Briefly, a pair of oligonucleotides for a given antisense RNA is produced as follows: A sequence complimentary to the first 15 bases of the open reading frame is flanked by an EcoR1 site on the 5 end and a HindIII site on the 3 end. Next, the pair of oligonucleotides is heated at 90° C. for one minute and then annealed in 2× ligation buffer (20 mM TRIS HCl pH 7.5, 10 mM MgCl2, 10 MM dithiothreitol (DTT) and 0.2 mM ATP) and then ligated to the EcoR1/Hind III site of the retroviral vector PMV7 (WO 91/15580).

[1749] For example, the 5′ coding portion of a polynucleotide that encodes the polypeptide of the present invention may be used to design an antisense RNA oligonucleotide of from about 10 to 40 base pairs in length. A DNA oligonucleotide is designed to be complementary to a region of the gene involved in transcription thereby preventing transcription and the production of the receptor. The antisense RNA oligonucleotide hybridizes to the mRNA in vivo and blocks translation of the mRNA molecule into receptor polypeptide.

[1750] In one embodiment, the antisense nucleic acid of the invention is produced intracellularly by transcription from an exogenous sequence. For example, a vector or a portion thereof, is transcribed, producing an antisense nucleic acid (RNA) of the invention. Such a vector would contain a sequence encoding the antisense nucleic acid. Such a vector can remain episomal or become chromosomally integrated, as long as it can be transcribed to produce the desired antisense RNA. Such vectors can be constructed by recombinant DNA technology methods standard in the art. Vectors can be plasmid, viral, or others known in the art, used for replication and expression in vertebrate cells. Expression of the sequence encoding the polypeptide of the present invention or fragments thereof, can be by any promoter known in the art to act in vertebrate, preferably human cells. Such promoters can be inducible or constitutive. Such promoters include, but are not limited to, the SV40 early promoter region (Bernoist and Chambon, Nature 29:304-310 (1981), the promoter contained in the 3′ long terminal repeat of Rous sarcoma virus (Yamamoto et al., Cell 22:787-797 (1980), the herpes thymidine promoter (Wagner et al., Proc. Natl. Acad. Sci. U.S.A. 78:1441-1445 (1981), the regulatory sequences of the metallothionein gene (Brinster, et al., Nature 296:39-42 (1982)), etc.

[1751] The antisense nucleic acids of the invention comprise a sequence complementary to at least a portion of an RNA transcript of a gene of the present invention. However, absolute complementarity, although preferred, is not required. A sequence “complementary to at least a portion of an RNA,” referred to herein, means a sequence having sufficient complementarity to be able to hybridize with the RNA, forming a stable duplex; in the case of double stranded antisense nucleic acids, a single strand of the duplex DNA may thus be tested, or triplex formation may be assayed. The ability to hybridize will depend on both the degree of complementarity and the length of the antisense nucleic acid. Generally, the larger the hybridizing nucleic acid, the more base mismatches with a RNA it may contain and still form a stable duplex (or triplex as the case may be). One skilled in the art can ascertain a tolerable degree of mismatch by use of standard procedures to determine the melting point of the hybridized complex.

[1752] Oligonucleotides that are complementary to the 5′ end of the message, e.g., the 5′ untranslated sequence up to and including the AUG initiation codon, should work most efficiently at inhibiting translation. However, sequences complementary to the 3′ untranslated sequences of mRNAs have been shown to be effective at inhibiting translation of mRNAs as well. See generally, Wagner, R., 1994, Nature 372:333-335. Thus, oligonucleotides complementary to either the 5′- or 3′-non-translated, non-coding regions of polynucleotide sequences described herein could be used in an antisense approach to inhibit translation of endogenous mRNA. Oligonucleotides complementary to the 5′ untranslated region of the mRNA should include the complement of the AUG start codon. Antisense oligonucleotides complementary to mRNA coding regions are less efficient inhibitors of translation but could be used in accordance with the invention. Whether designed to hybridize to the 5′-, 3′- or coding region of mRNA of the present invention, antisense nucleic acids should be at least six nucleotides in length, and are preferably oligonucleotides ranging from 6 to about 50 nucleotides in length. In specific aspects the oligonucleotide is at least 10 nucleotides, at least 17 nucleotides, at least 25 nucleotides or at least 50 nucleotides.

[1753] The polynucleotides of the invention can be DNA or RNA or chimeric mixtures or derivatives or modified versions thereof, single-stranded or double-stranded. The oligonucleotide can be modified at the base moiety, sugar moiety, or phosphate backbone, for example, to improve stability of the molecule, hybridization, etc. The oligonucleotide may include other appended groups such as peptides (e.g., for targeting host cell receptors in vivo), or agents facilitating transport across the cell membrane (see, e.g., Letsinger et al., 1989, Proc. Natl. Acad. Sci. U.S.A. 86:6553-6556; Lemaitre et al., 1987, Proc. Natl. Acad. Sci. 84:648-652; PCT Publication No. WO88/09810, published Dec. 15, 1988) or the blood-brain barrier (see, e.g., PCT Publication No. WO89/10134, published Apr. 25, 1988), hybridization-triggered cleavage agents. (See, e.g., Krol et al., 1988, BioTechniques 6:958-976) or intercalating agents. (See, e.g., Zon, 1988, Pharm. Res. 5:539-549). To this end, the oligonucleotide may be conjugated to another molecule, e.g., a peptide, hybridization triggered cross-linking agent, transport agent, hybridization-triggered cleavage agent, etc.

[1754] The antisense oligonucleotide may comprise at least one modified base moiety which is selected from the group including, but not limited to, 5-fluorouracil, 5-bromouracil, 5-chlorouracil, 5-iodouracil, hypoxanthine, xantine, 4-acetylcytosine, 5-(carboxyhydroxylmethyl) uracil, 5-carboxymethylaminomethyl-2-thiouridine, 5-carboxymethylaminomethyluracil, dihydrouracil, beta-D-galactosylqueosine, inosine, N6-isopentenyladenine, 1-methylguanine, 1-methylinosine, 2,2-dimethylguanine, 2-methyladenine, 2-methylguanine, 3-methylcytosine, 5-methylcytosine, N6-adenine, 7-methylguanine, 5-methylaminomethyluracil, 5-methoxyaminomethyl-2-thiouracil, beta-D-mannosylqueosine, 5′-methoxycarboxymethyluracil, 5-methoxyuracil, 2-methylthio-N-6-isopentenyladenine, uracil-5-oxyacetic acid (v), wybutoxosine, pseudouracil, queosine, 2-thiocytosine, 5-methyl-2-thiouracil, 2-thiouracil, 4-thiouracil, 5-methyluracil, uracil-5-oxyacetic acid methylester, uracil-5-oxyacetic acid (v), 5-methyl-2-thiouracil, 3-(3-amino-3-N-2-carboxypropyl) uracil, (acp3)w, and 2,6-diaminopurine.

[1755] The antisense oligonucleotide may also comprise at least one modified sugar moiety selected from the group including, but not limited to, arabinose, 2-fluoroarabinose, xylulose, and hexose.

[1756] In yet another embodiment, the antisense oligonucleotide comprises at least one modified phosphate backbone selected from the group including, but not limited to, a phosphorothioate, a phosphorodithioate, a phosphoramidothioate, a phosphoramidate, a phosphordiamidate, a methylphosphonate, an alkyl phosphotriester, and a formacetal or analog thereof.

[1757] In yet another embodiment, the antisense oligonucleotide is an a-anomeric oligonucleotide. An a-anomeric oligonucleotide forms specific double-stranded hybrids with complementary RNA in which, contrary to the usual b-units, the strands run parallel to each other (Gautier et al., 1987, Nucl. Acids Res. 15:6625-6641). The oligonucleotide is a 2′-O-methylribonucleotide (Inoue et al., 1987, Nucl. Acids Res. 15:6131-6148), or a chimeric RNA-DNA analogue (Inoue et al., 1987, FEBS Lett. 215:327-330).

[1758] Polynucleotides of the invention may be synthesized by standard methods known in the art, e.g. by use of an automated DNA synthesizer (such as are commercially available from Biosearch, Applied Biosystems, etc.). As examples, phosphorothioate oligonucleotides may be synthesized by the method of Stein et al. (1988, Nucl. Acids Res. 16:3209), methylphosphonate oligonucleotides can be prepared by use of controlled pore glass polymer supports (Sarin et al., 1988, Proc. Natl. Acad. Sci. U.S.A. 85:7448-7451), etc.

[1759] While antisense nucleotides complementary to the coding region sequence could be used, those complementary to the transcribed untranslated region are most preferred.

[1760] Potential antagonists according to the invention also include catalytic RNA, or a ribozyme (See, e.g., PCT International Publication WO 90/11364, published Oct. 4, 1990; Sarver et al., Science 247:1222-1225 (1990). While ribozymes that cleave mRNA at site specific recognition sequences can be used to destroy mRNAs, the use of hammerhead ribozymes is preferred. Hammerhead ribozymes cleave mRNAs at locations dictated by flanking regions that form complementary base pairs with the target mRNA. The sole requirement is that the target mRNA have the following sequence of two bases: 5′-UG-3′. The construction and production of hammerhead ribozymes is well known in the art and is described more fully in Haseloff and Gerlach, Nature 334:585-591 (1988). There are numerous potential hammerhead ribozyme cleavage sites within the nucleotide sequence of SEQ ID NO:X. Preferably, the ribozyme is engineered so that the cleavage recognition site is located near the 5′ end of the mRNA; i.e., to increase efficiency and minimize the intracellular accumulation of non-functional mRNA transcripts.

[1761] As in the antisense approach, the ribozymes of the invention can be composed of modified oligonucleotides (e.g., for improved stability, targeting, etc.) and should be delivered to cells which express in vivo. DNA constructs encoding the ribozyme may be introduced into the cell in the same manner as described above for the introduction of antisense encoding DNA. A preferred method of delivery involves using a DNA construct “encoding” the ribozyme under the control of a strong constitutive promoter, such as, for example, pol III or pol II promoter, so that transfected cells will produce sufficient quantities of the ribozyme to destroy endogenous messages and inhibit translation. Since ribozymes unlike antisense molecules, are catalytic, a lower intracellular concentration is required for efficiency.

[1762] Antagonist/agonist compounds may be employed to inhibit the cell growth and proliferation effects of the polypeptides of the present invention on neoplastic cells and tissues, i.e. stimulation of angiogenesis of tumors, and, therefore, retard or prevent abnormal cellular growth and proliferation, for example, in tumor formation or growth.

[1763] The antagonist/agonist may also be employed to prevent hyper-vascular diseases, and prevent the proliferation of epithelial lens cells after extracapsular cataract surgery. Prevention of the mitogenic activity of the polypeptides of the present invention may also be desirous in cases such as restenosis after balloon angioplasty.

[1764] The antagonist/agonist may also be employed to prevent the growth of scar tissue during wound healing.

[1765] The antagonist/agonist may also be employed to treat the diseases described herein.

[1766] Thus, the invention provides a method of treating disorders or diseases, including but not limited to the disorders or diseases listed throughout this application, associated with overexpression of a polynucleotide of the present invention by administering to a patient (a) an antisense molecule directed to the polynucleotide of the present invention, and/or (b) a ribozyme directed to the polynucleotide of the present invention.

Binding Peptides and Other Molecules

[1767] The invention also encompasses screening methods for identifying polypeptides and nonpolypeptides that bind polypeptides of the invention, and the binding molecules identified thereby. These binding molecules are useful, for example, as agonists and antagonists of the polypeptides of the invention. Such agonists and antagonists can be used, in accordance with the invention, in the therapeutic embodiments described in detail, below.

[1768] This method comprises the steps of:
[1769] contacting polypeptides of the invention with a plurality of molecules; and
[1770] identifying a molecule that binds the polypeptides of the invention.

[1771] The step of contacting the polypeptides of the invention with the plurality of molecules may be effected in a number of ways. For example, one may contemplate immobilizing the polypeptides on a solid support and bringing a solution of the plurality of molecules in contact with the immobilized polypeptides. Such a procedure would be akin to an affinity chromatographic process, with the affinity matrix being comprised of the immobilized polypeptides of the invention. The molecules having a selective affinity for the polypeptides can then be purified by affinity selection. The nature of the solid support, process for attachment of the polypeptides to the solid support, solvent, and conditions of the affinity isolation or selection are largely conventional and well known to those of ordinary skill in the art.

[1772] Alternatively, one may also separate a plurality of polypeptides into substantially separate fractions comprising a subset of or individual polypeptides. For instance, one can separate the plurality of polypeptides by gel electrophoresis, column chromatography, or like method known to those of ordinary skill for the separation of polypeptides. The individual polypeptides can also be produced by a transformed host cell in such a way as to be expressed on or about its outer surface (e.g., a recombinant phage). Individual isolates can then be “probed” by the polypeptides of the invention, optionally in the presence of an inducer should one be required for expression, to determine if any selective affinity interaction takes place between the polypeptides and the individual clone. Prior to contacting the polypeptides with each fraction comprising individual polypeptides, the polypeptides could first be transferred to a solid support for additional convenience. Such a solid support may simply be a piece of filter membrane, such as one made of nitrocellulose or nylon. In this manner, positive clones could be identified from a collection of transformed host cells of an expression library, which harbor a DNA construct encoding a polypeptide having a selective affinity for polypeptides of the invention. Furthermore, the amino acid sequence of the polypeptide having a selective affinity for the polypeptides of the invention can be determined directly by conventional means or the coding sequence of the DNA encoding the polypeptide can frequently be determined more conveniently. The primary sequence can then be deduced from the corresponding DNA sequence. If the amino acid sequence is to be determined from the polypeptide itself, one may use microsequencing techniques. The sequencing technique may include mass spectroscopy.

[1773] In certain situations, it may be desirable to wash away any unbound polypeptides from a mixture of the polypeptides of the invention and the plurality of polypeptides prior to attempting to determine or to detect the presence of a selective affinity interaction. Such a wash step may be particularly desirable when the polypeptides of the invention or the plurality of polypeptides are bound to a solid support.

[1774] The plurality of molecules provided according to this method may be provided by way of diversity libraries, such as random or combinatorial peptide or nonpeptide libraries which can be screened for molecules that specifically bind polypeptides of the invention. Many libraries are known in the art that can be used, e.g., chemically synthesized libraries, recombinant (e.g., phage display libraries), and in vitro translation-based libraries. Examples of chemically synthesized libraries are described in Fodor et al., 1991, Science 251:767-773; Houghten et al., 1991, Nature 354:84-86; Lam et al., 1991, Nature 354:82-84; Medynski, 1994, Bio/Technology 12:709-710; Gallop et al., 1994, J. Medicinal Chemistry 37(9):1233-1251; Ohlmeyer et al., 1993, Proc. Natl. Acad. Sci. USA 90:10922-10926; Erb et al., 1994, Proc. Natl. Acad. Sci. USA 91:11422-11426; Houghten et al., 1992, Biotechniques 13:412; Jayawickreme et al., 1994, Proc. Natl. Acad. Sci. USA 91:1614-1618; Salmon et al., 1993, Proc. Natl. Acad. Sci. USA 90:11708-11712; PCT Publication No. WO 93/20242; and Brenner and Lerner, 1992, Proc. Natl. Acad. Sci. USA 89:5381-5383.

[1775] Examples of phage display libraries are described in Scott and Smith, 1990, Science 249:386-390; Devlin et al., 1990, Science, 249:404-406; Christian, R. B., et al., 1992, J. Mol. Biol. 227:711-718); Lenstra, 1992, J. Immunol. Meth. 152:149-157; Kay et al., 1993, Gene 128:59-65; and PCT Publication No. WO 94/18318 dated Aug. 18, 1994.

[1776] In vitro translation-based libraries include but are not limited to those described in PCT Publication No. WO 91/05058 dated Apr. 18, 1991; and Mattheakis et al., 1994, Proc. Natl. Acad. Sci. USA 91:9022-9026.

[1777] By way of examples of nonpeptide libraries, a benzodiazepine library (see e.g., Bunin et al., 1994, Proc. Natl. Acad. Sci. USA 91:4708-4712) can be adapted for use. Peptoid libraries (Simon et al., 1992, Proc. Natl. Acad. Sci. USA 89:9367-9371) can also be used. Another example of a library that can be used, in which the amide functionalities in peptides have been permethylated to generate a chemically transformed combinatorial library, is described by Ostresh et al. (1994, Proc. Natl. Acad. Sci. USA 91:11138-11142).

[1778] The variety of non-peptide libraries that are useful in the present invention is great. For example, Ecker and Crooke, 1995, Bio/Technology 13:351-360 list benzodiazepines, hydantoins, piperazinediones, biphenyls, sugar analogs, beta-mercaptoketones, arylacetic acids, acylpiperidines, benzopyrans, cubanes, xanthines, aminimides, and oxazolones as among the chemical species that form the basis of various libraries.

[1779] Non-peptide libraries can be classified broadly into two types: decorated monomers and oligomers. Decorated monomer libraries employ a relatively simple scaffold structure upon which a variety functional groups is added. Often the scaffold will be a molecule with a known useful pharmacological activity. For example, the scaffold might be the benzodiazepine structure.

[1780] Non-peptide oligomer libraries utilize a large number of monomers that are assembled together in ways that create new shapes that depend on the order of the monomers. Among the monomer units that have been used are carbamates, pyrrolinones, and morpholinos. Peptoids, peptide-like oligomers in which the side chain is attached to the alpha amino group rather than the alpha carbon, form the basis of another version of non-peptide oligomer libraries. The first non-peptide oligomer libraries utilized a single type of monomer and thus contained a repeating backbone. Recent libraries have utilized more than one monomer, giving the libraries added flexibility.

[1781] Screening the libraries can be accomplished by any of a variety of commonly known methods. See, e.g., the following references, which disclose screening of peptide libraries: Parmley and Smith, 1989, Adv. Exp. Med. Biol. 251:215-218; Scott and Smith, 1990, Science 249:386-390; Fowlkes et al., 1992; BioTechniques 13:422-427; Oldenburg et al., 1992, Proc. Natl. Acad. Sci. USA 89:5393-5397; Yu et al., 1994, Cell 76:933-945; Staudt et al., 1988, Science 241:577-580; Bock et al., 1992, Nature 355:564-566; Tuerk et al., 1992, Proc. Natl. Acad. Sci. USA 89:6988-6992; Ellington et al., 1992, Nature 355:850-852; U.S. Pat. No. 5,096,815, U.S. Pat. No. 5,223,409, and U.S. Pat. No. 5,198,346, all to Ladner et al.; Rebar and Pabo, 1993, Science 263:671-673; and CT Publication No. WO 94/18318.

[1782] In a specific embodiment, screening to identify a molecule that binds polypeptides of the invention can be carried out by contacting the library members with polypeptides of the invention immobilized on a solid phase and harvesting those library members that bind to the polypeptides of the invention. Examples of such screening methods, termed “panning” techniques are described by way of example in Parmley and Smith, 1988, Gene 73:305-318; Fowlkes et al., 1992, BioTechniques 13:422-427; PCT Publication No. WO 94/18318; and in references cited herein.

[1783] In another embodiment, the two-hybrid system for selecting interacting proteins in yeast (Fields and Song, 1989, Nature 340:245-246; Chien et al., 1991, Proc. Natl. Acad. Sci. USA 88:9578-9582) can be used to identify molecules that specifically bind to polypeptides of the invention.

[1784] Where the binding molecule is a polypeptide, the polypeptide can be conveniently selected from any peptide library, including random peptide libraries, combinatorial peptide libraries, or biased peptide libraries. The term “biased” is used herein to mean that the method of generating the library is manipulated so as to restrict one or more parameters that govern the diversity of the resulting collection of molecules, in this case peptides.

[1785] Thus, a truly random peptide library would generate a collection of peptides in which the probability of finding a particular amino acid at a given position of the peptide is the same for all 20 amino acids. A bias can be introduced into the library, however, by specifying, for example, that a lysine occur every fifth amino acid or that positions 4, 8, and 9 of a decapeptide library be fixed to include only arginine. Clearly, many types of biases can be contemplated, and the present invention is not restricted to any particular bias. Furthermore, the present invention contemplates specific types of peptide libraries, such as phage displayed peptide libraries and those that utilize a DNA construct comprising a lambda phage vector with a DNA insert.

[1786] As mentioned above, in the case of a binding molecule that is a polypeptide, the polypeptide may have about 6 to less than about 60 amino acid residues, preferably about 6 to about 10 amino acid residues, and most preferably, about 6 to about 22 amino acids. In another embodiment, a binding polypeptide has in the range of 15-100 amino acids, or 20-50 amino acids.

[1787] The selected binding polypeptide can be obtained by chemical synthesis or recombinant expression.

Other Activities

[1788] A polypeptide, polynucleotide, agonist, or antagonist of the present invention, as a result of the ability to stimulate vascular endothelial cell growth, may be employed in treatment for stimulating re-vascularization of ischemic tissues due to various disease conditions such as thrombosis, arteriosclerosis, and other cardiovascular conditions. The polypeptide, polynucleotide, agonist, or antagonist of the present invention may also be employed to stimulate angiogenesis and limb regeneration, as discussed above.

[1789] A polypeptide, polynucleotide, agonist, or antagonist of the present invention may also be employed for treating wounds due to injuries, burns, post-operative tissue repair, and ulcers since they are mitogenic to various cells of different origins, such as fibroblast cells and skeletal muscle cells, and therefore, facilitate the repair or replacement of damaged or diseased tissue.

[1790] A polypeptide, polynucleotide, agonist, or antagonist of the present invention may also be employed stimulate neuronal growth and to treat and prevent neuronal damage which occurs in certain neuronal disorders or neuro-degenerative conditions such as Alzheimer's disease, Parkinson's disease, and AIDS-related complex. A polypeptide, polynucleotide, agonist, or antagonist of the present invention may have the ability to stimulate chondrocyte growth, therefore, they may be employed to enhance bone and periodontal regeneration and aid in tissue transplants or bone grafts.

[1791] A polypeptide, polynucleotide, agonist, or antagonist of the present invention may be also be employed to prevent skin aging due to sunburn by stimulating keratinocyte growth.

[1792] A polypeptide, polynucleotide, agonist, or antagonist of the present invention may also be employed for preventing hair loss, since FGF family members activate hair-forming cells and promotes melanocyte growth. Along the same lines, a polypeptide, polynucleotide, agonist, or antagonist of the present invention may be employed to stimulate growth and differentiation of hematopoietic cells and bone marrow cells when used in combination with other cytokines.

[1793] A polypeptide, polynucleotide, agonist, or antagonist of the present invention may also be employed to maintain organs before transplantation or for supporting cell culture of primary tissues. A polypeptide, polynucleotide, agonist, or antagonist of the present invention may also be employed for inducing tissue of mesodermal origin to differentiate in early embryos.

[1794] A polypeptide, polynucleotide, agonist, or antagonist of the present invention may also increase or decrease the differentiation or proliferation of embryonic stem cells, besides, as discussed above, hematopoietic lineage.

[1795] A polypeptide, polynucleotide, agonist, or antagonist of the present invention may also be used to modulate mammalian characteristics, such as body height, weight, hair color, eye color, skin, percentage of adipose tissue, pigmentation, size, and shape (e.g., cosmetic surgery). Similarly, a polypeptide, polynucleotide, agonist, or antagonist of the present invention may be used to modulate mammalian metabolism affecting catabolism, anabolism, processing, utilization, and storage of energy.

[1796] A polypeptide, polynucleotide, agonist, or antagonist of the present invention may be used to change a mammal's mental state or physical state by influencing biorhythms, caricadic rhythms, depression (including depressive disorders), tendency for violence, tolerance for pain, reproductive capabilities (preferably by Activin or Inhibin-like activity), hormonal or endocrine levels, appetite, libido, memory, stress, or other cognitive qualities.

[1797] A polypeptide, polynucleotide, agonist, or antagonist of the present invention may also be used as a food additive or preservative, such as to increase or decrease storage capabilities, fat content, lipid, protein, carbohydrate, vitamins, minerals, cofactors or other nutritional components.

[1798] The above-recited applications have uses in a wide variety of hosts. Such hosts include, but are not limited to, human, murine, rabbit, goat, guinea pig, camel, horse, mouse, rat, hamster, pig, micro-pig, chicken, goat, cow, sheep, dog, cat, non-human primate, and human. In specific embodiments, the host is a mouse, rabbit, goat, guinea pig, chicken, rat, hamster, pig, sheep, dog or cat. In preferred embodiments, the host is a mammal. In most preferred embodiments, the host is a human.

### Other Preferred Embodiments

[1799] Other preferred embodiments of the claimed invention include an isolated nucleic acid molecule comprising a nucleotide sequence which is at least 95% identical to a sequence of at least about 50 contiguous nucleotides in the nucleotide sequence of SEQ ID NO:X or the complementary strand thereto, the nucleotide sequence as defined in column 5 of Table 1B or columns 8 and 9 of Table 2 or the complementary strand thereto, and/or cDNA contained in ATCC Deposit No:Z.

[1800] Also preferred is a nucleic acid molecule wherein said sequence of contiguous nucleotides is included in the nucleotide sequence of the portion of SEQ ID NO:X as defined in column 5, “ORF (From-To)”, in Table 1B.

[1801] Also preferred is a nucleic acid molecule wherein said sequence of contiguous nucleotides is included in the nucleotide sequence of the portion of SEQ ID NO:X as defined in columns 8 and 9, “NT From” and “NT To” respectively, in Table 2.

[1802] Also preferred is an isolated nucleic acid molecule comprising a nucleotide sequence which is at least 95% identical to a sequence of at least about 150 contiguous nucleotides in the nucleotide sequence of SEQ ID NO:X or the complementary strand thereto, the nucleotide sequence as defined in column 5 of Table 1B or columns 8 and 9 of Table 2 or the complementary strand thereto, and/or cDNA contained in ATCC Deposit No:Z.

[1803] Further preferred is an isolated nucleic acid molecule comprising a nucleotide sequence which is at least 95% identical to a sequence of at least about 500 contiguous nucleotides in the nucleotide sequence of SEQ ID NO:X or the complementary strand thereto, the nucleotide sequence as defined in column 5 of Table 1B or columns 8 and 9 of Table 2 or the complementary strand thereto, and/or cDNA contained in ATCC Deposit No:Z.

[1804] A further preferred embodiment is a nucleic acid molecule comprising a nucleotide sequence which is at least 95% identical to the nucleotide sequence of the portion of SEQ ID NO:X defined in column 5, “ORF (From-To)”, in Table 1B.

[1805] A further preferred embodiment is a nucleic acid molecule comprising a nucleotide sequence which is at least 95% identical to the nucleotide sequence of the portion of SEQ ID NO:X defined in columns 8 and 9, “NT From” and “NT To”, respectively, in Table 2.

[1806] A further preferred embodiment is an isolated nucleic acid molecule comprising a nucleotide sequence which is at least 95% identical to the complete nucleotide sequence of SEQ ID NO:X or the complementary strand thereto, the nucleotide sequence as defined in column 5 of Table 1B or columns 8 and 9 of Table 2 or the complementary strand thereto, and/or cDNA contained in ATCC Deposit No:Z.

[1807] Also preferred is an isolated nucleic acid molecule which hybridizes under stringent hybridization conditions to a nucleic acid molecule comprising a nucleotide sequence of SEQ ID NO:X or the complementary strand thereto, the nucleotide sequence as defined in column 5 of Table 1B or columns 8 and 9 of Table 2 or the complementary strand thereto, and/or cDNA contained in ATCC Deposit No:Z, wherein said nucleic acid molecule which hybridizes does not hybridize under stringent hybridization conditions to a nucleic acid molecule having a nucleotide sequence consisting of only A residues or of only T residues.

[1808] Also preferred is a composition of matter comprising a DNA molecule which comprises the cDNA contained in ATCC Deposit No:Z.

[1809] Also preferred is an isolated nucleic acid molecule comprising a nucleotide sequence which is at least 95% identical to a sequence of at least 50 contiguous nucleotides of the cDNA sequence contained in ATCC Deposit No:Z.

[1810] Also preferred is an isolated nucleic acid molecule, wherein said sequence of at least 50 contiguous nucleotides is included in the nucleotide sequence of an open reading frame sequence encoded by cDNA contained in ATCC Deposit No:Z.

[1811] Also preferred is an isolated nucleic acid molecule comprising a nucleotide sequence which is at least 95% identical to sequence of at least 150 contiguous nucleotides in the nucleotide sequence encoded by cDNA contained in ATCC Deposit No:Z.

[1812] A further preferred embodiment is an isolated nucleic acid molecule comprising a nucleotide sequence which is at least 95% identical to sequence of at least 500 contiguous nucleotides in the nucleotide sequence encoded by cDNA contained in ATCC Deposit No:Z.

[1813] A further preferred embodiment is an isolated nucleic acid molecule comprising a nucleotide sequence which is at least 95% identical to the complete nucleotide sequence encoded by cDNA contained in ATCC Deposit No:Z.

[1814] A further preferred embodiment is a method for detecting in a biological sample a nucleic acid molecule comprising a nucleotide sequence which is at least 95% identical to a sequence of at least 50 contiguous nucleotides in a sequence selected from the group consisting of: a nucleotide sequence of SEQ ID NO:X or the complementary strand thereto; the nucleotide sequence as defined in column 5 of Table 1B or columns 8 and 9 of Table 2 or the complementary strand thereto; and a nucleotide sequence encoded by cDNA contained in ATCC Deposit No:Z; which method comprises a step of comparing a nucleotide sequence of at least one nucleic acid molecule in said sample with a sequence selected from said group and determining whether the sequence of said nucleic acid molecule in said sample is at least 95% identical to said selected sequence.

[1815] Also preferred is the above method wherein said step of comparing sequences comprises determining the extent of nucleic acid hybridization between nucleic acid molecules in said sample and a nucleic acid molecule comprising said sequence selected from said group. Similarly, also preferred is the above method wherein said step of comparing sequences is performed by comparing the nucleotide sequence determined from a nucleic acid molecule in said sample with said sequence selected from said group. The nucleic acid molecules can comprise DNA molecules or RNA molecules.

[1816] A further preferred embodiment is a method for identifying the species, tissue or cell type of a biological sample which method comprises a step of detecting nucleic acid molecules in said sample, if any, comprising a nucleotide sequence that is at least 95% identical to a sequence of at least 50 contiguous nucleotides in a sequence selected from the group consisting of: a nucleotide sequence of SEQ ID NO:X or the complementary strand thereto; the nucleotide sequence as defined in column 5 of Table 1B or columns 8 and 9 of Table 2 or the complementary strand thereto; and a nucleotide sequence of the cDNA contained in ATCC Deposit No:Z.

[1817] The method for identifying the species, tissue or cell type of a biological sample can comprise a step of detecting nucleic acid molecules comprising a nucleotide sequence in a panel of at least two nucleotide sequences, wherein at least one sequence in said panel is at least 95% identical to a sequence of at least 50 contiguous nucleotides in a sequence selected from said group.

[1818] Also preferred is a method for diagnosing in a subject a pathological condition associated with abnormal structure or expression of a nucleotide sequence of SEQ ID NO:X or the complementary strand thereto; the nucleotide sequence as defined in column 5 of Table 1B or columns 8 and 9 of Table 2 or the complementary strand thereto; or the cDNA contained in ATCC Deposit No:Z which encodes a protein, wherein the method comprises a step of detecting in a biological sample obtained from said subject nucleic acid molecules, if any, comprising a nucleotide sequence that is at least 95% identical to a sequence of at least 50 contiguous nucleotides in a sequence selected from the group consisting of: a nucleotide sequence of SEQ ID NO:X or the complementary strand thereto; the nucleotide sequence as defined in column 5 of Table 1B or columns 8 and 9 of Table 2 or the complementary strand thereto; and a nucleotide sequence of cDNA contained in ATCC Deposit No:Z.

[1819] The method for diagnosing a pathological condition can comprise a step of detecting nucleic acid molecules comprising a nucleotide sequence in a panel of at least two nucleotide sequences, wherein at least one sequence in said panel is at least 95% identical to a sequence of at least 50 contiguous nucleotides in a sequence selected from said group.

[1820] Also preferred is a composition of matter comprising isolated nucleic acid molecules wherein the nucleotide sequences of said nucleic acid molecules comprise a panel of at least two nucleotide sequences, wherein at least one sequence in said panel is at least 95% identical to a sequence of at least 50 contiguous nucleotides in a sequence selected from the group consisting of: a nucleotide sequence of SEQ ID NO:X or the complementary strand thereto; the nucleotide sequence as defined in column 4 of Table 1B or columns 8 and 9 of Table 2 or the complementary strand thereto; and a nucleotide sequence encoded by cDNA contained in ATCC Deposit No:Z. The nucleic acid molecules can comprise DNA molecules or RNA molecules.

[1821] Also preferred is a composition of matter comprising isolated nucleic acid molecules wherein the nucleotide sequences of said nucleic acid molecules comprise a DNA microarray or “chip” of at least 1, 2, 3, 4, 5, 6, 7, 8, 9, 10, 15, 20, 25, 30, 40, 50, 100, 150, 200; 250, 300, 500, 1000, 2000, 3000, or 4000 nucleotide sequences, wherein at least one sequence in said DNA microarray or “chip” is at least 95% identical to a sequence of at least 50 contiguous nucleotides in a sequence selected from the group consisting of: a nucleotide sequence of SEQ ID NO:X wherein X is any integer as defined in Table 1A and/or 1B; and a nucleotide sequence encoded by a human cDNA clone identified by a cDNA “Clone ID” in Table 1A and/or 1B.

[1822] Also preferred is an isolated polypeptide comprising an amino acid sequence at least 90% identical to a sequence of at least about 10 contiguous amino acids in the polypeptide sequence of SEQ ID NO:Y; a polypeptide encoded by SEQ ID NO:X or the complementary strand thereto; the polypeptide encoded by the nucleotide sequence as defined in columns 8 and 9 of Table 2; and/or a polypeptide encoded by cDNA contained in ATCC Deposit No:Z.

[1823] Also preferred is an isolated polypeptide comprising an amino acid sequence at least 95% identical to a sequence of at least about 30 contiguous amino acids in the amino acid sequence of SEQ ID NO:Y; a polypeptide encoded by SEQ ID NO:X or the complementary strand thereto; the polypeptide encoded by the nucleotide sequence as defined in columns 8 and 9 of Table 2; and/or a polypeptide encoded by cDNA contained in ATCC Deposit No:Z.

[1824] Further preferred is an isolated polypeptide comprising an amino acid sequence at least 95% identical to a sequence of at least about 100 contiguous amino acids in the amino acid sequence of SEQ ID NO:Y; a polypeptide encoded by SEQ ID NO:X or the complementary strand thereto; the polypeptide encoded by the nucleotide sequence as defined in columns 8 and 9 of Table 2; and/or a polypeptide encoded by cDNA contained in ATCC Deposit No:Z.

[1825] Further preferred is an isolated polypeptide comprising an amino acid sequence at least 95% identical to the complete amino acid sequence of SEQ ID NO:Y; a polypeptide encoded by SEQ ID NO:X or the complementary strand thereto; the polypeptide encoded by the nucleotide sequence as defined in columns 8 and 9 of Table 2; and/or a polypeptide encoded by cDNA contained in ATCC Deposit No:Z.

[1826] Further preferred is an isolated polypeptide comprising an amino acid sequence at least 90% identical to a sequence of at least about 10 contiguous amino acids in the complete amino acid sequence of a polypeptide encoded by contained in ATCC Deposit No:Z

[1827] Also preferred is a polypeptide wherein said sequence of contiguous amino acids is included in the amino acid sequence of a portion of said polypeptide encoded by cDNA contained in ATCC Deposit No:Z; a polypeptide encoded by SEQ ID NO:X or the complementary strand thereto; the polypeptide encoded by the nucleotide sequence as defined in columns 8 and 9 of Table 2; and/or the polypeptide sequence of SEQ ID NO:Y.

[1828] Also preferred is an isolated polypeptide comprising an amino acid sequence at least 95% identical to a sequence of at least about 30 contiguous amino acids in the amino acid sequence of a polypeptide encoded by the cDNA contained in ATCC Deposit No:Z.

[1829] Also preferred is an isolated polypeptide comprising an amino acid sequence at least 95% identical to a sequence of at least about 100 contiguous amino acids in the amino acid sequence of a polypeptide encoded by cDNA contained in ATCC Deposit No:Z.

[1830] Also preferred is an isolated polypeptide comprising an amino acid sequence at least 95% identical to the amino acid sequence of a polypeptide encoded by the cDNA contained in ATCC Deposit No:Z.

[1831] Further preferred is an isolated antibody which binds specifically to a polypeptide comprising an amino acid sequence that is at least 90% identical to a sequence of at least 10 contiguous amino acids in a sequence selected from the group consisting of: a polypeptide sequence of SEQ ID NO:Y; a polypeptide encoded by SEQ ID NO:X or the complementary strand thereto; the polypeptide encoded by the nucleotide sequence as defined in columns 8 and 9 of Table 2; and a polypeptide encoded by the cDNA contained in ATCC Deposit No:Z.

[1832] Further preferred is a method for detecting in a biological sample a polypeptide comprising an amino acid sequence which is at least 90% identical to a sequence of at least 10 contiguous amino acids in a sequence selected from the group consisting of: a polypeptide sequence of SEQ ID NO:Y; a polypeptide encoded by SEQ ID NO:X or the complementary strand thereto; the polypeptide encoded by the nucleotide sequence as defined in columns 8 and 9 of Table 2; and a polypeptide encoded by the cDNA contained in ATCC Deposit No:Z; which method comprises a step of comparing an amino acid sequence of at least one polypeptide molecule in said sample with a sequence selected from said group and determining whether the sequence of said polypeptide molecule in said sample is at least 90% identical to said sequence of at least 10 contiguous amino acids.

[1833] Also preferred is the above method wherein said step of comparing an amino acid sequence of at least one polypeptide molecule in said sample with a sequence selected from said group comprises determining the extent of specific binding of polypeptides in said sample to an antibody which binds specifically to a polypeptide comprising an amino acid sequence that is at least 90% identical to a sequence of at least 10 contiguous amino acids in a sequence selected from the group consisting of: a polypeptide sequence of SEQ ID NO:Y; a polypeptide encoded by SEQ ID NO:X or the complementary strand thereto; the polypeptide encoded by the nucleotide sequence as defined in columns 8 and 9 of Table 2; and a polypeptide encoded by the cDNA contained in ATCC Deposit No:Z.

[1834] Also preferred is the above method wherein said step of comparing sequences is performed by comparing the amino acid sequence determined from a polypeptide molecule in said sample with said sequence selected from said group.

[1835] Also preferred is a method for identifying the species, tissue or cell type of a biological sample which method comprises a step of detecting polypeptide molecules in said sample, if any, comprising an amino acid sequence that is at least 90% identical to a sequence of at least 10 contiguous amino acids in a sequence selected from the group consisting of: polypeptide sequence of SEQ ID NO:Y; a polypeptide encoded by SEQ ID NO:X or the complementary strand thereto; the polypeptide encoded by the nucleotide sequence as defined in columns 8 and 9 of Table 2; and a polypeptide encoded by the cDNA contained in ATCC Deposit No:Z.

[1836] Also preferred is the above method for identifying the species, tissue or cell type of a biological sample, which method comprises a step of detecting polypeptide molecules comprising an amino acid sequence in a panel of at least two amino acid sequences, wherein at least one sequence in said panel is at least 90% identical to a sequence of at least 10 contiguous amino acids in a sequence selected from the above group.

[1837] Also preferred is a method for diagnosing in a subject a pathological condition associated with abnormal structure or expression of a nucleic acid sequence identified in Table 1A, 1B or Table 2 encoding a polypeptide, which method comprises a step of detecting in a biological sample obtained from said subject polypeptide molecules comprising an amino acid sequence in a panel of at least two amino acid sequences, wherein at least one sequence in said panel is at least 90% identical to a sequence of at least 10 contiguous amino acids in a sequence selected from the group consisting of: polypeptide sequence of SEQ ID NO:Y; a polypeptide encoded by SEQ ID NO:X or the complementary strand thereto; the polypeptide encoded by the nucleotide sequence as defined in columns 8 and 9 of Table 2; and a polypeptide encoded by the cDNA contained in ATCC Deposit No:Z.

[1838] In any of these methods, the step of detecting said polypeptide molecules includes using an antibody.

[1839] Also preferred is an isolated nucleic acid molecule comprising a nucleotide sequence which is at least 95% identical to a nucleotide sequence encoding a polypeptide wherein said polypeptide comprises an amino acid sequence that is at least 90% identical to a sequence of at least 10 contiguous amino acids in a sequence selected from the group consisting of: polypeptide sequence of SEQ ID NO:Y; a polypeptide encoded by SEQ ID NO:X or the complementary strand thereto; the polypeptide encoded by the nucleotide sequence as defined in columns 8 and 9 of Table 2; and a polypeptide encoded by the cDNA contained in ATCC Deposit No:Z.

[1840] Also preferred is an isolated nucleic acid molecule, wherein said nucleotide sequence encoding a polypeptide has been optimized for expression of said polypeptide in a prokaryotic host.

[1841] Also preferred is a polypeptide molecule, wherein said polypeptide comprises an amino acid sequence selected from the group consisting of: polypeptide sequence of SEQ ID NO:Y; a polypeptide encoded by SEQ ID NO:X or the complementary strand thereto; the polypeptide encoded by the nucleotide sequence as defined in columns 8 and 9 of Table 2; and a polypeptide encoded by the cDNA contained in ATCC Deposit No:Z.

[1842] Further preferred is a method of making a recombinant vector comprising inserting any of the above isolated nucleic acid molecule into a vector. Also preferred is the recombinant vector produced by this method. Also preferred is a method of making a recombinant host cell comprising introducing the vector into a host cell, as well as the recombinant host cell produced by this method.

[1843] Also preferred is a method of making an isolated polypeptide comprising culturing this recombinant host cell under conditions such that said polypeptide is expressed and recovering said polypeptide. Also preferred is this method of making an isolated polypeptide, wherein said recombinant host cell is a eukaryotic cell and said polypeptide is a human protein comprising an amino acid sequence selected from the group consisting of: polypeptide sequence of SEQ ID NO:Y; a polypeptide encoded by SEQ ID NO:X or the complementary strand thereto; the polypeptide encoded by the nucleotide sequence as defined in columns 8 and 9 of Table 2; and a polypeptide encoded by the cDNA contained in ATCC Deposit No:Z. The isolated polypeptide produced by this method is also preferred.

[1844] Also preferred is a method of treatment of an individual in need of an increased level of a protein activity, which method comprises administering to such an individual a Therapeutic comprising an amount of an isolated polypeptide, polynucleotide, immunogenic fragment or analogue thereof, binding agent, antibody, or antigen binding fragment of the claimed invention effective to increase the level of said protein activity in said individual.

[1845] Also preferred is a method of treatment of an individual in need of a decreased level of a protein activity, which method comprised administering to such an individual a Therapeutic comprising an amount of an isolated polypeptide, polynucleotide, immunogenic fragment or analogue thereof, binding agent, antibody, or antigen binding fragment of the claimed invention effective to decrease the level of said protein activity in said individual.

[1846] Also preferred is a method of treatment of an individual in need of a specific delivery of toxic compositions to diseased cells (e.g., tumors, leukemias or lymphomas), which method comprises administering to such an individual a Therapeutic comprising an amount of an isolated polypeptide of the invention, including, but not limited to a binding agent, or antibody of the claimed invention that are associated with toxin or cytotoxic prodrugs.

[1847] Having generally described the invention, the same will be more readily understood by reference to the following examples, which are provided by way of illustration and are not intended as limiting.

### EXAMPLES

### Example 1

### Isolation of a Selected cDNA Clone from the Deposited Sample

[1848] Each ATCC Deposit No:Z is contained in a plasmid vector. In many cases, the vector used to construct the library is a phage vector from which a plasmid has been excised. The following correlates the related plasmid for each phage vector used in constructing the cDNA library.

| Vector Used to Construct Library | Corresponding Deposited Plasmid |
|---|---|
| Lambda Zap | pBluescript (pBS) |
| Uni-Zap XR | pBluescript (pBS) |
| Zap Express | pBK |
| lafmid BA | plafmid BA |
| pSport1 | pSport1 |
| pCMVSport 2.0 | pCMVSport 2.0 |
| pCMVSport 3.0 | pCMVSport 3.0 |
| pCR ® 2.1 | pCR ® 2.1 |

[1849] Vectors Lambda Zap (U.S. Pat. Nos. 5,128,256 and 5,286,636), Uni-Zap XR (U.S. Pat. Nos. 5,128,256 and 5,286,636), Zap Express (U.S. Pat. Nos. 5,128,256 and 5,286,636), pBluescript (pBS) (Short, J. M. et al., Nucleic Acids Res. 16:7583-7600 (1988); Alting-Mees, M. A. and Short, J. M., Nucleic Acids Res. 17:9494 (1989)) and pBK (Alting-Mees, M. A. et al., Strategies 5:58-61 (1992)) are commercially available from Stratagene Cloning Systems, Inc., 11011 N. Torrey Pines Road, La Jolla, Calif., 92037. pBS contains an ampicillin resistance gene and pBK contains a neomycin resistance gene. Both can be transformed into E. coli strain XL-1 Blue, also available from Stratagene. pBS comes in 4 forms SK+, SK−, KS+ and KS. The S and K refers to the orientation of the polylinker to the T7 and T3 primer sequences which flank the polylinker region (“S” is for SacI and “K” is for KpnI which are the first sites on each respective end of the linker). “+” or “−” refer to the orientation of the f1 origin of replication (“ori”), such that in one orientation, single stranded rescue initiated from the f1 ori generates sense strand DNA and in the other, antisense.

[1850] Vectors pSport1, pCMVSport 2.0, pCMVSport 3.0, and pCMVSport 6 were obtained from Life Technologies, Inc., P.O. Box 6009, Gaithersburg, Md. 20897. All Sport vectors contain an ampicillin resistance gene and may be transformed into E. coli strain DH10B, also available from Life Technologies. (See, for instance, Gruber, C. E., et al., Focus 15:59 (1993)). Vector lafmid BA (Bento Soares, Columbia University, NY) contains an ampicillin resistance gene and can be transformed into E. coli strain XL-1 Blue. Vector pCR®2.1, which is available from Invitrogen, 1600 Faraday Avenue, Carlsbad, Calif. 92008, contains an ampicillin resistance gene and may be transformed into E. coli strain DH10B, available from Life Technologies. (See, for instance, Clark, J. M., Nuc. Acids Res. 16:9677-9686 (1988) and Mead, D. et al., Bio/Technology 9: (1991)). Preferably, a polynucleotide of the present invention does not comprise the phage vector sequences identified for the particular clone in Table 7, as well as the corresponding plasmid vector sequences designated above.

[1851] The deposited material in the sample assigned the ATCC Deposit Number cited by reference to Tables 1, and 2 for any given cDNA clone also may contain one or more additional plasmids, each comprising a cDNA clone different from that given clone. Thus, deposits sharing the same ATCC Deposit Number contain at least a plasmid for each ATCC Deposit No:Z.

[1852] Two nonlimiting examples are provided below for isolating a particular clone from the deposited sample of plasmid cDNAs cited for that clone. First, a plasmid is directly isolated by screening the clones using a polynucleotide probe corresponding to the nucleotide sequence of SEQ ID NO:X.

[1853] Particularly, a specific polynucleotide with 30-40 nucleotides is synthesized using an Applied Biosystems DNA synthesizer according to the sequence reported. The oligonucleotide is labeled, for instance, with ³²P-γ-ATP using T4 polynucleotide kinase and purified according to routine methods. (E.g., Maniatis et al., Molecular Cloning: A Laboratory Manual, Cold Spring Harbor Press, Cold Spring, N.Y. (1982)). The plasmid mixture is transformed into a suitable host, as indicated above (such as XL-1 Blue (Stratagene)) using techniques known to those of skill in the art, such as those provided by the vector supplier or in related publications or patents cited above. The transformants are plated on 1.5% agar plates (containing the appropriate selection agent, e.g., ampicillin) to a density of about 150 transformants (colonies) per plate. These plates are screened using Nylon membranes according to routine methods for bacterial colony screening (e.g., Sambrook et al., Molecular Cloning: A Laboratory Manual, 2nd Edit., (1989), Cold Spring Harbor Laboratory Press, pages 1.93 to 1.104), or other techniques known to those of skill in the art.

[1854] Alternatively, two primers of 17-20 nucleotides derived from both ends of the nucleotide sequence of SEQ ID NO:X are synthesized and used to amplify the desired cDNA using the deposited cDNA plasmid as a template. The polymerase chain reaction is carried out under routine conditions, for instance, in 25 μl of reaction mixture with 0.5 ug of the above cDNA template. A convenient reaction mixture is 1.5-5 mM MgCl₂, 0.01% (w/v) gelatin, 20 μM each of dATP, dCTP, dGTP, dTTP, 25 pmol of each primer and 0.25 Unit of Taq polymerase. Thirty five cycles of PCR (denaturation at 94° C. for 1 min; annealing at 55° C. for 1 min; elongation at 72° C. for 1 min) are performed with a Perkin-Elmer Cetus automated thermal cycler. The amplified product is analyzed by agarose gel electrophoresis and the DNA band with expected molecular weight is excised and purified. The PCR product is verified to be the selected sequence by subcloning and sequencing the DNA product.

[1855] Several methods are available for the identification of the 5′ or 3′ non-coding portions of a gene which may not be present in the deposited clone. These methods include but are not limited to, filter probing, clone enrichment using specific probes, and protocols similar or identical to 5′ and 3′ “RACE” protocols which are well known in the art. For instance, a method similar to 5′ RACE is available for generating the missing 5′ end of a desired full-length transcript. (Fromont-Racine et al., Nucleic Acids Res. 21(7):1683-1684 (1993)).

[1856] Briefly, a specific RNA oligonucleotide is ligated to the 5′ ends of a population of RNA presumably containing full-length gene RNA transcripts. A primer set containing a primer specific to the ligated RNA oligonucleotide and a primer specific to a known sequence of the gene of interest is used to PCR amplify the 5′ portion of the desired full-length gene. This amplified product may then be sequenced and used to generate the full length gene.

[1857] This above method starts with total RNA isolated from the desired source, although poly-A+ RNA can be used. The RNA preparation can then be treated with phosphatase if necessary to eliminate 5′ phosphate groups on degraded or damaged RNA which may interfere with the later RNA ligase step. The phosphatase should then be inactivated and the RNA treated with tobacco acid pyrophosphatase in order to remove the cap structure present at the 5′ ends of messenger RNAs. This reaction leaves a 5′ phosphate group at the 5′ end of the cap cleaved RNA which can then be ligated to an RNA oligonucleotide using T4 RNA ligase.

[1858] This modified RNA preparation is used as a template for first strand cDNA synthesis using a gene specific oligonucleotide. The first strand synthesis reaction is used as a template for PCR amplification of the desired 5′ end using a primer specific to the ligated RNA oligonucleotide and a primer specific to the known sequence of the gene of interest. The resultant product is then sequenced and analyzed to confirm that the 5′ end sequence belongs to the desired gene.

### Example 2

### Isolation of Genomic Clones Corresponding to a Polynucleotide

[1859] A human genomic P1 library (Genomic Systems, Inc.) is screened by PCR using primers selected for the sequence corresponding to SEQ ID NO:X according to the method described in Example 1. (See also, Sambrook.)

### Example 3

### Tissue Specific Expression Analysis

[1860] The Human Genome Sciences, Inc. (HGS) database is derived from sequencing tissue and/or disease specific cDNA libraries. Libraries generated from a particular tissue are selected and the specific tissue expression pattern of EST groups or assembled contigs within these libraries is determined by comparison of the expression patterns of those groups or contigs within the entire database. ESTs and assembled contigs which show tissue specific expression are selected.

[1861] The original clone from which the specific EST sequence was generated, or in the case of an assembled contig, the clone from which the 5′ most EST sequence was generated, is obtained from the catalogued library of clones and the insert amplified by PCR using methods known in the art. The PCR product is denatured and then transferred in 96 or 384 well format to a nylon membrane (Schleicher and Scheull) generating an array filter of tissue specific clones. Housekeeping genes, maize genes, and known tissue specific genes are included on the filters. These targets can be used in signal normalization and to validate assay sensitivity. Additional targets are included to monitor probe length and specificity of hybridization.

[1862] Radioactively labeled hybridization probes are generated by first strand cDNA synthesis per the manufacturer's instructions (Life Technologies) from mRNA/RNA samples prepared from the specific tissue being analyzed (e.g., prostate, prostate cancer, ovarian, ovarian cancer, etc.). The hybridization probes are purified by gel exclusion chromatography, quantitated, and hybridized with the array filters in hybridization bottles at 65° C. overnight. The filters are washed under stringent conditions and signals are captured using a Fuji phosphorimager.

[1863] Data is extracted using AIS software and following background subtraction, signal normalization is performed. This includes a normalization of filter-wide expression levels between different experimental runs. Genes that are differentially expressed in the tissue of interest are identified.

### Example 4

### Chromosomal Mapping of the Polynucleotides

[1864] An oligonucleotide primer set is designed according to the sequence at the 5′ end of SEQ ID NO:X. This primer preferably spans about 100 nucleotides. This primer set is then used in a polymerase chain reaction under the following set of conditions: 30 seconds, 95° C.; 1 minute, 56° C.; 1 minute, 70° C. This cycle is repeated 32 times followed by one 5 minute cycle at 70° C. Human, mouse, and hamster DNA is used as template in addition to a somatic cell hybrid panel containing individual chromosomes or chromosome fragments (Bios, Inc). The reactions are analyzed on either 8% polyacrylamide gels or 3.5% agarose gels. Chromosome mapping is determined by the presence of an approximately 100 bp PCR fragment in the particular somatic cell hybrid.

### Example 5

### Bacterial Expression of a Polypeptide

[1865] A polynucleotide encoding a polypeptide of the present invention is amplified using PCR oligonucleotide primers corresponding to the 5′ and 3′ ends of the DNA sequence, as outlined in Example 1, to synthesize insertion fragments. The primers used to amplify the cDNA insert should preferably contain restriction sites, such as BamHI and XbaI, at the 5′ end of the primers in order to clone the amplified product into the expression vector. For example, BamHI and XbaI correspond to the restriction enzyme sites on the bacterial expression vector pQE-9. (Qiagen, Inc., Chatsworth, Calif.). This plasmid vector encodes antibiotic resistance (Amp^{r}), a bacterial origin of replication (ori), an IPTG-regulatable promoter/operator (P/O), a ribosome binding site (RBS), a 6-histidine tag (6-His), and restriction enzyme cloning sites.

[1866] The pQE-9 vector is digested with BamHI and XbaI and the amplified fragment is ligated into the pQE-9 vector maintaining the reading frame initiated at the bacterial RBS. The ligation mixture is then used to transform the E. coli strain M15/rep4 (Qiagen, Inc.) which contains multiple copies of the plasmid pREP4, which expresses the lacI repressor and also confers kanamycin resistance (Kan^{r}). Transformants are identified by their ability to grow on LB plates and ampicillin/kanamycin resistant colonies are selected. Plasmid DNA is isolated and confirmed by restriction analysis.

[1867] Clones containing the desired constructs are grown overnight (O/N) in liquid culture in LB media supplemented with both Amp (100 ug/ml) and Kan (25 ug/ml). The O/N culture is used to inoculate a large culture at a ratio of 1:100 to 1:250. The cells are grown to an optical density 600 (O.D.⁶⁰⁰) of between 0.4 and 0.6. IPTG (Isopropyl-B-D-thiogalacto pyranoside) is then added to a final concentration of 1 mM. IPTG induces by inactivating the lacI repressor, clearing the P/O leading to increased gene expression.

[1868] Cells are grown for an extra 3 to 4 hours. Cells are then harvested by centrifugation (20 mins at 6000×g). The cell pellet is solubilized in the chaotropic agent 6 Molar Guanidine HCl by stirring for 3-4 hours at 4° C. The cell debris is removed by centrifugation, and the supernatant containing the polypeptide is loaded onto a nickel-nitrilo-tri-acetic acid (“Ni-NTA”) affinity resin column (available from QIAGEN, Inc., supra). Proteins with a 6×His tag bind to the Ni-NTA resin with high affinity and can be purified in a simple one-step procedure (for details see: The QIAexpressionist (1995) QIAGEN, Inc., supra).

[1869] Briefly, the supernatant is loaded onto the column in 6 M guanidine-HCl, pH 8. The column is first washed with 10 volumes of 6 M guanidine-HCl, pH 8, then washed with 10 volumes of 6 M guanidine-HCl pH 6, and finally the polypeptide is eluted with 6 M guanidine-HCl, pH 5.

[1870] The purified protein is then renatured by dialyzing it against phosphate-buffered saline (PBS) or 50 mM Na-acetate, pH 6 buffer plus 200 mM NaCl. Alternatively, the protein can be successfully refolded while immobilized on the Ni-NTA column. The recommended conditions are as follows: renature using a linear 6M-1M urea gradient in 500 mM NaCl, 20% glycerol, 20 mM Tris/HCl pH 7.4, containing protease inhibitors. The renaturation should be performed over a period of 1.5 hours or more. After renaturation the proteins are eluted by the addition of 250 mM immidazole. Immidazole is removed by a final dialyzing step against PBS or 50 mM sodium acetate pH 6 buffer plus 200 mM NaCl. The purified protein is stored at 4° C. or frozen at −80° C.

[1871] In addition to the above expression vector, the present invention further includes an expression vector, called pHE4a (ATCC Accession Number 209645, deposited on Feb. 25, 1998) which contains phage operator and promoter elements operatively linked to a polynucleotide of the present invention, called pHE4a. (ATCC Accession Number 209645, deposited on Feb. 25, 1998.) This vector contains: 1) a neomycinphosphotransferase gene as a selection marker, 2) an E. coli origin of replication, 3) a T5 phage promoter sequence, 4) two lac operator sequences, 5) a Shine-Delgarno sequence, and 6) the lactose operon repressor gene (lacIq). The origin of replication (oriC) is derived from pUC19 (LTI, Gaithersburg, Md.). The promoter and operator sequences are made synthetically.

[1872] DNA can be inserted into the pHE4a by restricting the vector with NdeI and XbaI, BamHI, XhoI, or Asp718, running the restricted product on a gel, and isolating the larger fragment (the stuffer fragment should be about 310 base pairs). The DNA insert is generated according to the PCR protocol described in Example 1, using PCR primers having restriction sites for NdeI (5′ primer) and XbaI, BamHI, XhoI, or Asp718 (3′ primer). The PCR insert is gel purified and restricted with compatible enzymes. The insert and vector are ligated according to standard protocols.

[1873] The engineered vector could easily be substituted in the above protocol to express protein in a bacterial system.

### Example 6

### Purification of a Polypeptide from an Inclusion Body

[1874] The following alternative method can be used to purify a polypeptide expressed in E coli when it is present in the form of inclusion bodies. Unless otherwise specified, all of the following steps are conducted at 4-10° C.

[1875] Upon completion of the production phase of the E. coli fermentation, the cell culture is cooled to 4-10° C. and the cells harvested by continuous centrifugation at 15,000 rpm (Heraeus Sepatech). On the basis of the expected yield of protein per unit weight of cell paste and the amount of purified protein required, an appropriate amount of cell paste, by weight, is suspended in a buffer solution containing 100 mM Tris, 50 mM EDTA, pH 7.4. The cells are dispersed to a homogeneous suspension using a high shear mixer.

[1876] The cells are then lysed by passing the solution through a microfluidizer (Microfuidics, Corp. or APV Gaulin, Inc.) twice at 4000-6000 psi. The homogenate is then mixed with NaCl solution to a final concentration of 0.5 M NaCl, followed by centrifugation at 7000×g for 15 min. The resultant pellet is washed again using 0.5M NaCl, 100 mM Tris, 50 mM EDTA, pH 7.4.

[1877] The resulting washed inclusion bodies are solubilized with 1.5 M guanidine hydrochloride (GUHCl) for 2-4 hours After 7000×g centrifugation for 15 min., the pellet is discarded and the polypeptide containing supernatant is incubated at 4° C. overnight to allow further GuHCl extraction.

[1878] Following high speed centrifugation (30,000×g) to remove insoluble particles, the GuHCl solubilized protein is refolded by quickly mixing the GuHCl extract with 20 volumes of buffer containing 50 mM sodium, pH 4.5, 150 mM NaCl, 2 mM EDTA by vigorous stirring. The refolded diluted protein solution is kept at 4° C. without mixing for 12 hours prior to further purification steps.

[1879] To clarify the refolded polypeptide solution, a previously prepared tangential filtration unit equipped with 0.16 μm membrane filter with appropriate surface area (e.g., Filtron), equilibrated with 40 mM sodium acetate, pH 6.0 is employed. The filtered sample is loaded onto a cation exchange resin (e.g., Poros HS-50, Perseptive Biosystems). The column is washed with 40 mM sodium acetate, pH 6.0 and eluted with 250 mM, 500 mM, 1000 mM, and 1500 mM NaCl in the same buffer, in a stepwise manner. The absorbance at 280 nm of the effluent is continuously monitored. Fractions are collected and further analyzed by SDS-PAGE.

[1880] Fractions containing the polypeptide are then pooled and mixed with 4 volumes of water. The diluted sample is then loaded onto a previously prepared set of tandem columns of strong anion (Poros HQ-50, Perseptive Biosystems) and weak anion (Poros CM-20, Perseptive Biosystems) exchange resins. The columns are equilibrated with 40 mM sodium acetate, pH 6.0. Both columns are washed with 40 mM sodium acetate, pH 6.0, 200 mM NaCl. The CM-20 column is then eluted using a 10 column volume linear gradient ranging from 0.2 M NaCl, 50 mM sodium acetate, pH 6.0 to 1.0 M NaCl, 50 mM sodium acetate, pH 6.5. Fractions are collected under constant A₂₈₀ monitoring of the effluent. Fractions containing the polypeptide (determined, for instance, by 16% SDS-PAGE) are then pooled.

[1881] The resultant polypeptide should exhibit greater than 95% purity after the above refolding and purification steps. No major contaminant bands should be observed from Commassie blue stained 16% SDS-PAGE gel when 5 μg of purified protein is loaded. The purified protein can also be tested for endotoxin/LPS contamination, and typically the LPS content is less than 0.1 ng/ml according to LAL assays.

### Example 7

### Cloning and Expression of a Polypeptide in a Baculovirus Expression System

[1882] In this example, the plasmid shuttle vector pA2 is used to insert a polynucleotide into a baculovirus to express a polypeptide. This expression vector contains the strong polyhedrin promoter of the Autographa californica nuclear polyhedrosis virus (AcMNPV) followed by convenient restriction sites such as BamHI, Xba I and Asp718. The polyadenylation site of the simian virus 40 (“SV40”) is used for efficient polyadenylation. For easy selection of recombinant virus, the plasmid contains the beta-galactosidase gene from E. coli under control of a weak Drosophila promoter in the same orientation, followed by the polyadenylation signal of the polyhedrin gene. The inserted genes are flanked on both sides by viral sequences for cell-mediated homologous recombination with wild-type viral DNA to generate a viable virus that express the cloned polynucleotide.

[1883] Many other baculovirus vectors can be used in place of the vector above, such as pAc373, pVL941, and pAcIM1, as one skilled in the art would readily appreciate, as long as the construct provides appropriately located signals for transcription, translation, secretion and the like, including a signal peptide and an in-frame AUG as required. Such vectors are described, for instance, in Luckow et al., Virology 170:31-39 (1989).

[1884] Specifically, the cDNA sequence contained in the deposited clone, including the AUG initiation codon, is amplified using the PCR protocol described in Example 1. If a naturally occurring signal sequence is used to produce the polypeptide of the present invention, the pA2 vector does not need a second signal peptide. Alternatively, the vector can be modified (pA2 GP) to include a baculovirus leader sequence, using the standard methods described in Summers et al., “A Manual of Methods for Baculovirus Vectors and Insect Cell Culture Procedures,” Texas Agricultural Experimental Station Bulletin No. 1555 (1987).

[1885] The amplified fragment is isolated from a 1% agarose gel using a commercially available kit (“Geneclean,” BIO 101 Inc., La Jolla, Calif.). The fragment then is digested with appropriate restriction enzymes and again purified on a 1% agarose gel.

[1886] The plasmid is digested with the corresponding restriction enzymes and optionally, can be dephosphorylated using calf intestinal phosphatase, using routine procedures known in the art. The DNA is then isolated from a 1% agarose gel using a commercially available kit (“Geneclean” BIO 101 Inc., La Jolla, Calif.).

[1887] The fragment and the dephosphorylated plasmid are ligated together with T4 DNA ligase. E. coli HB101 or other suitable E. coli hosts such as XL-1 Blue (Stratagene Cloning Systems, La Jolla, Calif.) cells are transformed with the ligation mixture and spread on culture plates. Bacteria containing the plasmid are identified by digesting. DNA from individual colonies and analyzing the digestion product by gel electrophoresis. The sequence of the cloned fragment is confirmed by DNA sequencing.

[1888] Five μg of a plasmid containing the polynucleotide is co-transfected with 1.0 μg of a commercially available linearized baculovirus DNA (“BaculoGold™ baculovirus DNA, Pharmingen, San Diego, Calif.), using the lipofection method described by Felgner et al., Proc. Natl. Acad. Sci. USA 84:7413-7417 (1987). One μg of BaculoGold™ virus DNA and 5 μg of the plasmid are mixed in a sterile well of a microtiter plate containing 50 μl of serum-free Grace's medium (Life Technologies Inc., Gaithersburg, Md.). Afterwards, 10 μl Lipofectin plus 90 μl Grace's medium are added, mixed and incubated for 15 minutes at room temperature. Then the transfection mixture is added drop-wise to Sf9 insect cells (ATCC CRL 1711) seeded in a 35 mm tissue culture plate with 1 ml Grace's medium without serum. The plate is then incubated for 5 hours at 27° C. The transfection solution is then removed from the plate and 1 ml of Grace's insect medium supplemented with 10% fetal calf serum is added. Cultivation is then continued at 27° C. for four days.

[1889] After four days the supernatant is collected and a plaque assay is performed, as described by Summers and Smith, supra. An agarose gel with “Blue Gal” (Life Technologies Inc., Gaithersburg) is used to allow easy identification and isolation of gal-expressing clones, which produce blue-stained plaques. (A detailed description of a “plaque assay” of this type can also be found in the user's guide for insect cell culture and baculovirology distributed by Life Technologies Inc., Gaithersburg, page 9-10.) After appropriate incubation, blue stained plaques are picked with the tip of a micropipettor (e.g., Eppendorf). The agar containing the recombinant viruses is then resuspended in a microcentrifuge tube containing 200 μl of Grace's medium and the suspension containing the recombinant baculovirus is used to infect Sf9 cells seeded in 35 mm dishes. Four days later the supernatants of these culture dishes are harvested and then they are stored at 4° C.

[1890] To verify the expression of the polypeptide, Sf9 cells are grown in Grace's medium supplemented with 10% heat-inactivated FBS. The cells are infected with the recombinant baculovirus containing the polynucleotide at a multiplicity of infection (“MOI”) of about 2. If radiolabeled proteins are desired, 6 hours later the medium is removed and is replaced with SF900 II medium minus methionine and cysteine (available from Life Technologies Inc., Rockville, Md.). After 42 hours, 5 μCi of ³⁵S-methionine and 5 μCi ³⁵S-cysteine (available from Amersham) are added. The cells are further incubated for 16 hours and then are harvested by centrifugation. The proteins in the supernatant as well as the intracellular proteins are analyzed by SDS-PAGE followed by autoradiography (if radiolabeled).

[1891] Microsequencing of the amino acid sequence of the amino terminus of purified protein may be used to determine the amino terminal sequence of the produced protein.

### Example 8

### Expression of a Polypeptide in Mammalian Cells

[1892] The polypeptide of the present invention can be expressed in a mammalian cell. A typical mammalian expression vector contains a promoter element, which mediates the initiation of transcription of mRNA, a protein coding sequence, and signals required for the termination of transcription and polyadenylation of the transcript. Additional elements include enhancers, Kozak sequences and intervening sequences flanked by donor and acceptor sites for RNA splicing. Highly efficient transcription is achieved with the early and late promoters from SV40, the long terminal repeats (LTRs) from Retroviruses, e.g., RSV, HTLVI, HIVI and the early promoter of the cytomegalovirus (CMV). However, cellular elements can also be used (e.g., the human actin promoter).

[1893] Suitable expression vectors for use in practicing the present invention include, for example, vectors such as pSVL and pMSG (Pharmacia, Uppsala, Sweden), pRSVcat (ATCC 37152), pSV2dhfr (ATCC 37146), pBC12MI (ATCC 67109), pCMVSport 2.0, and pCMVSport 3.0. Mammalian host cells that could be used include, human Hela, 293, H9 and Jurkat cells, mouse NIH3T3 and C127 cells, Cos 1, Cos 7 and CV1, quail QC1-3 cells, mouse L cells and Chinese hamster ovary (CHO) cells.

[1894] Alternatively, the polypeptide can be expressed in stable cell lines containing the polynucleotide integrated into a chromosome. The co-transfection with a selectable marker such as DHFR, gpt, neomycin, or hygromycin allows the identification and isolation of the transfected cells.

[1895] The transfected gene can also be amplified to express large amounts of the encoded protein. The DHFR (dihydrofolate reductase) marker is useful in developing cell lines that carry several hundred or even several thousand copies of the gene of interest. (See, e.g., Alt, F. W., et al., J. Biol. Chem. 253:1357-1370 (1978); Hamlin, J. L. and Ma, C., Biochem. et Biophys. Acta, 1097:107-143 (1990); Page, M. J. and Sydenham, M. A., Biotechnology 9:64-68 (1991)). Another useful selection marker is the enzyme glutamine synthase (GS) (Murphy et al., Biochem J. 227:277-279 (1991); Bebbington et al., Bio/Technology 10:169-175 (1992). Using these markers, the mammalian cells are grown in selective medium and the cells with the highest resistance are selected. These cell lines contain the amplified gene(s) integrated into a chromosome. Chinese hamster ovary (CHO) and NSO cells are often used for the production of proteins.

[1896] Derivatives of the plasmid pSV2-dhfr (ATCC Accession No. 37146), the expression vectors pC4 (ATCC Accession No. 209646) and pC6 (ATCC Accession No. 209647) contain the strong promoter (LTR) of the Rous Sarcoma Virus (Cullen et al., Molecular and Cellular Biology, 438-447 (March, 1985)) plus a fragment of the CMV-enhancer (Boshart et al., Cell 41:521-530 (1985)). Multiple cloning sites, e.g., with the restriction enzyme cleavage sites BamHI, XbaI and Asp718, facilitate the cloning of the gene of interest. The vectors also contain the 3′ intron, the polyadenylation and termination signal of the rat preproinsulin gene, and the mouse DHFR gene under control of the SV40 early promoter.

[1897] Specifically, the plasmid pC6, for example, is digested with appropriate restriction enzymes and then dephosphorylated using calf intestinal phosphates by procedures known in the art. The vector is then isolated from a 1% agarose gel.

[1898] A polynucleotide of the present invention is amplified according to the protocol outlined in Example 1. If a naturally occurring signal sequence is used to produce the polypeptide of the present invention, the vector does not need a second signal peptide. Alternatively, if a naturally occurring signal sequence is not used, the vector can be modified to include a heterologous signal sequence. (See, e.g., International Publication No. WO 96/34891.)

[1899] The amplified fragment is isolated from a 1% agarose gel using a commercially available kit (“Geneclean,” BIO 101 Inc., La Jolla, Calif.). The fragment then is digested with appropriate restriction enzymes and again purified on a 1% agarose gel.

[1900] The amplified fragment is then digested with the same restriction enzyme and purified on a 1% agarose gel. The isolated fragment and the dephosphorylated vector are then ligated with T4 DNA ligase. E. coli HB101 or XL-1 Blue cells are then transformed and bacteria are identified that contain the fragment inserted into plasmid pC6 using, for instance, restriction enzyme analysis.

[1901] Chinese hamster ovary cells lacking an active DHFR gene is used for transfection. Five μg of the expression plasmid pC6 or pC4 is cotransfected with 0.5 μg of the plasmid pSVneo using lipofectin (Felgner et al., supra). The plasmid pSV2-neo contains a dominant selectable marker, the neo gene from Tn5 encoding an enzyme that confers resistance to a group of antibiotics including G418. The cells are seeded in alpha minus MEM supplemented with 1 mg/ml G418. After 2 days, the cells are trypsinized and seeded in hybridoma cloning plates (Greiner, Germany) in alpha minus MEM supplemented with 10, 25, or 50 ng/ml of methotrexate plus 1 mg/ml G418. After about 10-14 days single clones are trypsinized and then seeded in 6-well petri dishes or 10 ml flasks using different concentrations of methotrexate (50 nM, 100 nM, 200 nM, 400 nM, 800 nM). Clones growing at the highest concentrations of methotrexate are then transferred to new 6-well plates containing even higher concentrations of methotrexate (1 μM, 2 μM, 5 μM, 10 mM, 20 mM). The same procedure is repeated until clones are obtained which grow at a concentration of 100-200 μM. Expression of the desired gene product is analyzed, for instance, by SDS-PAGE and Western blot or by reversed phase HPLC analysis.

### Example 9

### Protein Fusions

[1902] The polypeptides of the present invention are preferably fused to other proteins. These fusion proteins can be used for a variety of applications. For example, fusion of the present polypeptides to His-tag, HA-tag, protein A, IgG domains, and maltose binding protein facilitates purification. (See Example 5; see also EP A 394,827; Traunecker, et al., Nature 331:84-86 (1988)). Similarly, fusion to IgG-1, IgG-3, and albumin increases the halflife time in vivo. Nuclear localization signals fused to the polypeptides of the present invention can target the protein to a specific subcellular localization, while covalent heterodimer or homodimers can increase or decrease the activity of a fusion protein. Fusion proteins can also create chimeric molecules having more than one function. Finally, fusion proteins can increase solubility and/or stability of the fused protein compared to the non-fused protein. All of the types of fusion proteins described above can be made by modifying the following protocol, which outlines the fusion of a polypeptide to an IgG molecule, or the protocol described in Example 5.

[1903] Briefly, the human Fc portion of the IgG molecule can be PCR amplified, using primers that span the 5′ and 3′ ends of the sequence described below. These primers also should have convenient restriction enzyme sites that will facilitate cloning into an expression vector, preferably a mammalian expression vector.

[1904] For example, if pC4 (ATCC Accession No. 209646) is used, the human Fc portion can be ligated into the BamHI cloning site. Note that the 3′ BamHI site should be destroyed. Next, the vector containing the human Fc portion is re-restricted with BamHI, linearizing the vector, and a polynucleotide of the present invention, isolated by the PCR protocol described in Example 1, is ligated into this BamHI site. Note that the polynucleotide is cloned without a stop codon, otherwise a fusion protein will not be produced.

[1905] If the naturally occurring signal sequence is used to produce the polypeptide of the present invention, pC4 does not need a second signal peptide. Alternatively, if the naturally occurring signal sequence is not used, the vector can be modified to include a heterologous signal sequence. (See, e.g., International Publication No. WO 96/34891.)

[1906] Human IgG Fc Region:

| (SEQ ID NO:1) | |
|---|---|
| | GGGATCCGGAGCCCAAATCTTCTGACAAAACTCACACATGCCCACCGTGCCCA |
| | GCACCTGAATTCGAGGGTGCACCGTCAGTCTTCCTCTTCCCCCCAAAACCCAAG |
| | GACACCCTCATGATCTCCCGGACTCCTGAGGTCACATGCGTGGTGGTGGACGTA |
| | AGCCACGAAGACCCTGAGGTCAAGTTCAACTGGTACGTGGACGGCGTGGAGGT |
| | GCATAATGCCAAGACAAAGCCGCGGGAGGAGCAGTACAACAGCACGTACCGTG |
| | TGGTCAGCGTCCTCACCGTCCTGCACCAGGACTGGCTGAATGGCAAGGAGTAC |
| | AAGTGCAAGGTCTCCAACAAAGCCCTCCCAACCCCCATCGAGAAAACCATCTC |
| | CAAAGCCAAAGGGCAGCCCCGAGAACCACAGGTGTACACCCTGCCCCCATCCC |
| | GGGATGAGCTGACCAAGAACCAGGTCAGCCTGACCTGCCTGGTCAAAGGCTTC |
| | TATCCAAGCGACATCGCCGTGGAGTGGGAGAGCAATGGGCAGCCGGAGAACAA |
| | CTACAAGACCACGCCTCCCGTGCTGGACTCCGACGGCTCCTTCTTCCTCTACAG |
| | CAAGCTCACCGTGGACAAGAGCAGGTGGCAGCAGGGGAACGTCTTCTCATGCT |
| | CCGTGATGCATGAGGCTCTGCACAACCACTACACGCAGAAGAGCCTCTCCCTGT |
| | CTCCGGGTAAATGAGTGCGACGGCCGCGACTCTAGAGGAT |

### Example 10

### Production of an Antibody from a Polypeptide

a) Hybridoma Technology

[1907] The antibodies of the present invention can be prepared by a variety of methods. (See, Current Protocols, Chapter 2.) As one example of such methods, cells expressing a polypeptide of the present invention are administered to an animal to induce the production of sera containing polyclonal antibodies. In a preferred method, a preparation of a polypeptide of the present invention is prepared and purified to render it substantially free of natural contaminants. Such a preparation is then introduced into an animal in order to produce polyclonal antisera of greater specific activity.

[1908] Monoclonal antibodies specific for a polypeptide of the present invention are prepared using hybridoma technology (Kohler et al., Nature 256:495 (1975); Kohler et al., Eur. J. Immunol. 6:511 (1976); Kohler et al., Eur. J. Immunol. 6:292 (1976); Hammerling et al., in: Monoclonal Antibodies and T-Cell Hybridomas, Elsevier, N.Y., pp. 563-681 (1981)). In general, an animal (preferably a mouse) is immunized with a polypeptide of the present invention or, more preferably, with a secreted polypeptide-expressing cell. Such polypeptide-expressing cells are cultured in any suitable tissue culture medium, preferably in Earle's modified Eagle's medium supplemented with 10% fetal bovine serum (inactivated at about 56° C.), and supplemented with about 10 g/l of nonessential amino acids, about 1,000 U/ml of penicillin, and about 100 μg/ml of streptomycin.

[1909] The splenocytes of such mice are extracted and fused with a suitable myeloma cell line. Any suitable myeloma cell line may be employed in accordance with the present invention; however, it is preferable to employ the parent myeloma cell line (SP20), available from the ATCC. After fusion, the resulting hybridoma cells are selectively maintained in HAT medium, and then cloned by limiting dilution as described by Wands et al. (Gastroenterology 80:225-232 (1981)). The hybridoma cells obtained through such a selection are then assayed to identify clones which secrete antibodies capable of binding the polypeptide of the present invention.

[1910] Alternatively, additional antibodies capable of binding to a polypeptide of the present invention can be produced in a two-step procedure using anti-idiotypic antibodies. Such a method makes use of the fact that antibodies are themselves antigens, and therefore, it is possible to obtain an antibody which binds to a second antibody. In accordance with this method, protein specific antibodies are used to immunize an animal, preferably a mouse. The splenocytes of such an animal are then used to produce hybridoma cells, and the hybridoma cells are screened to identify clones which produce an antibody whose ability to bind to the polypeptide-specific antibody can be blocked by said polypeptide. Such antibodies comprise anti-idiotypic antibodies to the polypeptide-specific antibody and are used to immunize an animal to induce formation of further polypeptide-specific antibodies.

[1911] For in vivo use of antibodies in humans, an antibody is “humanized”. Such antibodies can be produced using genetic constructs derived from hybridoma cells producing the monoclonal antibodies described above. Methods for producing chimeric and humanized antibodies are known in the art and are discussed herein. (See, for review, Morrison, Science 229:1202 (1985); Oi et al., BioTechniques 4:214 (1986); Cabilly et al., U.S. Pat. No. 4,816,567; Taniguchi et al., EP 171496; Morrison et al., EP 173494; Neuberger et al., WO 8601533; Robinson et al., International Publication No. WO 8702671; Boulianne et al., Nature 312:643 (1984); Neuberger et al., Nature 314:268 (1985)).

b) Isolation of Antibody Fragments Directed Against a Polypeptide of the Present Invention from a Library of scFvs

[1912] Naturally occurring V-genes isolated from human PBLs are constructed into a library of antibody fragments which contain reactivities against a polypeptide of the present invention to which the donor may or may not have been exposed (see e.g., U.S. Pat. No. 5,885,793 incorporated herein by reference in its entirety).

[1913] Rescue of the Library. A library of scFvs is constructed from the RNA of human PBLs as described in International Publication No. WO 92/01047. To rescue phage displaying antibody fragments, approximately 10⁹ E. coli harboring the phagemid are used to inoculate 50 ml of 2×TY containing 1% glucose and 100 μg/ml of ampicillin (2×TY-AMP-GLU) and grown to an O.D. of 0.8 with shaking. Five ml of this culture is used to inoculate 50 ml of 2×TY-AMP-GLU, 2×108 TU of delta gene 3 helper (M13 delta gene III, see International Publication No. WO 92/01047) are added and the culture incubated at 37° C. for 45 minutes without shaking and then at 37° C. for 45 minutes with shaking. The culture is centrifuged at 4000 r.p.m. for 10 min. and the pellet resuspended in 2 liters of 2×TY containing 100 μg/ml ampicillin and 50 ug/ml kanamycin and grown overnight. Phage are prepared as described in International Publication No. WO 92/01047.

[1914] M13 delta gene III is prepared as follows: M13 delta gene III helper phage does not encode gene III protein, hence the phage(mid) displaying antibody fragments have a greater avidity of binding to antigen. Infectious M13 delta gene III particles are made by growing the helper phage in cells harboring a pUC19 derivative supplying the wild type gene III protein during phage morphogenesis. The culture is incubated for 1 hour at 37° C. without shaking and then for a further hour at 37° C. with shaking. Cells are spun down (IEC-Centra 8,400 r.p.m. for 10 min), resuspended in 300 ml 2×TY broth containing 100 μg ampicillin/ml and 25 μg kanamycin/ml (2×TY-AMP-KAN) and grown overnight, shaking at 37° C. Phage particles are purified and concentrated from the culture medium by two PEG-precipitations (Sambrook et al., 1990), resuspended in 2 ml PBS and passed through a 0.45 μm filter (Minisart NML; Sartorius) to give a final concentration of approximately 1013 transducing units/ml (ampicillin-resistant clones).

[1915] Panning of the Library. Immunotubes (Nunc) are coated overnight in PBS with 4 ml of either 100 μg/ml or 10 μg/ml of a polypeptide of the present invention. Tubes are blocked with 2% Marvel-PBS for 2 hours at 37° C. and then washed 3 times in PBS. Approximately 10¹³ TU of phage is applied to the tube and incubated for 30 minutes at room temperature tumbling on an over and under turntable and then left to stand for another 1.5 hours. Tubes are washed 10 times with PBS 0.1% Tween-20 and 10 times with PBS. Phage are eluted by adding 1 ml of 100 mM triethylamine and rotating 15 minutes on an under and over turntable after which the solution is immediately neutralized with 0.5 ml of 1.0M Tris-HCl, pH 7.4. Phage are then used to infect 10 ml of mid-log E. coli TG1 by incubating eluted phage with bacteria for 30 minutes at 37° C. The E. coli are then plated on TYE plates containing 1% glucose and 100 μg/ml ampicillin. The resulting bacterial library is then rescued with delta gene 3 helper phage as described above to prepare phage for a subsequent round of selection. This process is then repeated for a total of 4 rounds of affinity purification with tube-washing increased to 20 times with PBS, 0.1% Tween-20 and 20 times with PBS for rounds 3 and 4.

[1916] Characterization of Binders. Eluted phage from the 3rd and 4th rounds of selection are used to infect E. coli HB 2151 and soluble scFv is produced (Marks, et al., 1991) from single colonies for assay. ELISAs are performed with microtitre plates coated with either 10 pg/ml of the polypeptide of the present invention in 50 mM bicarbonate pH 9.6. Clones positive in ELISA are further characterized by PCR fingerprinting (see, e.g., International Publication No. WO 92/01047) and then by sequencing. These ELISA positive clones may also be further characterized by techniques known in the art, such as, for example, epitope mapping, binding affinity, receptor signal transduction, ability to block or competitively inhibit antibody/antigen binding, and competitive agonistic or antagonistic activity.

### Example 11

### Method of Determining Alterations in a Gene Corresponding to a Polynucleotide

[1917] RNA isolated from entire families or individual patients presenting with a phenotype of interest (such as a disease) is isolated. cDNA is then generated from these RNA samples using protocols known in the art. (See, Sambrook.) The cDNA is then used as a template for PCR, employing primers surrounding regions of interest in SEQ ID NO:X; and/or the nucleotide sequence of the cDNA contained in ATCC Deposit No:Z. Suggested PCR conditions consist of 35 cycles at 95 degrees C. for 30 seconds; 60-120 seconds at 52-58 degrees C.; and 60-120 seconds at 70 degrees C., using buffer solutions described in Sidransky et al., Science 252:706 (1991).

[1918] PCR products are then sequenced using primers labeled at their 5′ end with T4 polynucleotide kinase, employing SequiTherm Polymerase (Epicentre Technologies). The intron-exon boundaries of selected exons is also determined and genomic PCR products analyzed to confirm the results. PCR products harboring suspected mutations are then cloned and sequenced to validate the results of the direct sequencing.

[1919] PCR products are cloned into T-tailed vectors as described in Holton et al., Nucleic Acids Research, 19:1156 (1991) and sequenced with T7 polymerase (United States Biochemical). Affected individuals are identified by mutations not present in unaffected individuals.

[1920] Genomic rearrangements are also observed as a method of determining alterations in a gene corresponding to a polynucleotide. Genomic clones isolated according to Example 2 are nick-translated with digoxigenindeoxy-uridine 5′-triphosphate (Boehringer Manheim), and FISH performed as described in Johnson et al., Methods Cell Biol. 35:73-99 (1991). Hybridization with the labeled probe is carried out using a vast excess of human cot-1 DNA for specific hybridization to the corresponding genomic locus.

[1921] Chromosomes are counterstained with 4,6-diamino-2-phenylidole and propidium iodide, producing a combination of C- and R-bands. Aligned images for precise mapping are obtained using a triple-band filter set (Chroma Technology, Brattleboro, Vt.) in combination with a cooled charge-coupled device camera (Photometrics, Tucson, Ariz.) and variable excitation wavelength filters. (Johnson et al., Genet. Anal. Tech. Appl., 8:75 (1991)). Image collection, analysis and chromosomal fractional length measurements are performed using the ISee Graphical Program System. (Inovision Corporation, Durham, N.C.) Chromosome alterations of the genomic region hybridized by the probe are identified as insertions, deletions, and translocations. These alterations are used as a diagnostic marker for an associated disease.

### Example 12

### Method of Detecting Abnormal Levels of a Polypeptide in a Biological Sample

[1922] A polypeptide of the present invention can be detected in a biological sample, and if an increased or decreased level of the polypeptide is detected, this polypeptide is a marker for a particular phenotype. Methods of detection are numerous, and thus, it is understood that one skilled in the art can modify the following assay to fit their particular needs.

[1923] For example, antibody-sandwich ELISAs are used to detect polypeptides in a sample, preferably a biological sample. Wells of a microtiter plate are coated with specific antibodies, at a final concentration of 0.2 to 10 ug/ml. The antibodies are either monoclonal or polyclonal and are produced by the method described in Example 10. The wells are blocked so that non-specific binding of the polypeptide to the well is reduced.

[1924] The coated wells are then incubated for >2 hours at RT with a sample containing the polypeptide. Preferably, serial dilutions of the sample should be used to validate results. The plates are then washed three times with deionized or distilled water to remove unbound polypeptide.

[1925] Next, 50 ul of specific antibody-alkaline phosphatase conjugate, at a concentration of 25-400 ng, is added and incubated for 2 hours at room temperature. The plates are again washed three times with deionized or distilled water to remove unbound conjugate.

[1926] Add 75 ul of 4-methylumbelliferyl phosphate (MUP) or p-nitrophenyl phosphate (NPP) substrate solution to each well and incubate 1 hour at room temperature. Measure the reaction by a microtiter plate reader. Prepare a standard curve, using serial dilutions of a control sample, and plot polypeptide concentration on the X-axis (log scale) and fluorescence or absorbance of the Y-axis (linear scale). Interpolate the concentration of the polypeptide in the sample using the standard curve.

### Example 13

### Formulation

[1927] The invention also provides methods of treatment and/or prevention of diseases or disorders (such as, for example, any one or more of the diseases or disorders disclosed herein) by administration to a subject of an effective amount of a Therapeutic. By therapeutic is meant polynucleotides or polypeptides of the invention (including fragments and variants), agonists or antagonists thereof, and/or antibodies thereto, in combination with a pharmaceutically acceptable carrier type (e.g., a sterile carrier).

[1928] The Therapeutic will be formulated and dosed in a fashion consistent with good medical practice, taking into account the clinical condition of the individual patient (especially the side effects of treatment with the Therapeutic alone), the site of delivery, the method of administration, the scheduling of administration, and other factors known to practitioners. The “effective amount” for purposes herein is thus determined by such considerations.

[1929] As a general proposition, the total pharmaceutically effective amount of the Therapeutic administered parenterally per dose will be in the range of about 1 ug/kg/day to 10 mg/kg/day of patient body weight, although, as noted above, this will be subject to therapeutic discretion. More preferably, this dose is at least 0.01 mg/kg/day, and most preferably for humans between about 0.01 and 1 mg/kg/day for the hormone. If given continuously, the Therapeutic is typically administered at a dose rate of about 1 ug/kg/hour to about 50 ug/kg/hour, either by 1-4 injections per day or by continuous subcutaneous infusions, for example, using a mini-pump. An intravenous bag solution may also be employed. The length of treatment needed to observe changes and the interval following treatment for responses to occur appears to vary depending on the desired effect.

[1930] Therapeutics can be are administered orally, rectally, parenterally, intracistemally, intravaginally, intraperitoneally, topically (as by powders, ointments, gels, drops or transdermal patch), bucally, or as an oral or nasal spray. “Pharmaceutically acceptable carrier” refers to a non-toxic solid, semisolid or liquid filler, diluent, encapsulating material or formulation auxiliary of any. The term “parenteral” as used herein refers to modes of administration which include intravenous, intramuscular, intraperitoneal, intrasternal, subcutaneous and intraarticular injection and infusion.

[1931] Therapeutics of the invention are also suitably administered by sustained-release systems. Suitable examples of sustained-release Therapeutics are administered orally, rectally, parenterally, intracistemally, intravaginally, intraperitoneally, topically (as by powders, ointments, gels, drops or transdermal patch), bucally, or as an oral or nasal spray. “Pharmaceutically acceptable carrier” refers to a non-toxic solid, semisolid or liquid filler, diluent, encapsulating material or formulation auxiliary of any type. The term “parenteral” as used herein refers to modes of administration which include intravenous, intramuscular, intraperitoneal, intrasternal, subcutaneous and intraarticular injection and infusion.

[1932] Therapeutics of the invention are also suitably administered by sustained-release systems. Suitable examples of sustained-release Therapeutics include suitable polymeric materials (such as, for example, semi-permeable polymer matrices in the form of shaped articles, e.g., films, or mirocapsules), suitable hydrophobic materials (for example as an emulsion in an acceptable oil) or ion exchange resins, and sparingly soluble derivatives (such as, for example, a sparingly soluble salt).

[1933] Sustained-release matrices include polylactides (U.S. Pat. No. 3,773,919, EP 58,481), copolymers of L-glutamic acid and gamma-ethyl-L-glutamate (Sidman et al., Biopolymers 22:547-556 (1983)), poly (2-hydroxyethyl methacrylate) (Langer et al., J. Biomed. Mater. Res. 15:167-277 (1981), and Langer, Chem. Tech. 12:98-105 (1982)), ethylene vinyl acetate (Langer et al., Id.) or poly-D-(−)-3-hydroxybutyric acid (EP 133,988).

[1934] In a preferred embodiment, polypeptide, polynucleotide, and antibody compositions of the invention are formulated in a biodegradable, polymeric drug delivery system, for example as described in U.S. Pat. Nos. 4,938,763; 5,278,201; 5,278,202; 5,324,519; 5,340,849; and 5,487,897 and in International Publication Numbers WO01/35929, WO00/24374, and WO00/06117 which are hereby incorporated by reference in their entirety. In specific preferred embodiments the polypeptide, polynucleotide, and antibody compositions of the invention are formulated using the ATRIGEL® Biodegradable System of Atrix Laboratories, Inc. (Fort Collins, Colo.).

[1935] Examples of biodegradable polymers which can be used in the formulation of polypeptide, polynucleotide, and antibody compositions, include but are not limited to, polylactides, polyglycolides, polycaprolactones, polyanhydrides, polyamides, polyurethanes, polyesteramides, polyorthoesters, polydioxanones, polyacetals, polyketals, polycarbonates, polyorthocarbonates, polyphosphazenes, polyhydroxybutyrates, polyhydroxyvalerates, polyalkylene oxalates, polyalkylene succinates, poly(malic acid), poly(amino acids), poly(methyl vinyl ether), poly(maleic anhydride), polyvinylpyrrolidone, polyethylene glycol, polyhydroxycellulose, chitin, chitosan, and copolymers, terpolymers, or combinations or mixtures of the above materials. The preferred polymers are those that have a lower degree of crystallization and are more hydrophobic. These polymers and copolymers are more soluble in the biocompatible solvents than the highly crystalline polymers such as polyglycolide and chitin which also have a high degree of hydrogen-bonding. Preferred materials with the desired solubility parameters are the polylactides, polycaprolactones, and copolymers of these with glycolide in which there are more amorphous regions to enhance solubility. In specific preferred embodiments, the biodegradable polymers which can be used in the formulation of polypeptide, polynucleotide, and antibody compositions are poly(lactide-co-glycolides). Polymer properties such as molecular weight, hydrophobicity, and lactide/glycolide ratio may be modified to obtain the desired polypeptide, polynucleotide, or antibody release profile (See, e.g., Ravivarapu et al., Journal of Pharmaceutical Sciences 89:732-741 (2000), which is hereby incorporated by reference in its entirety).

[1936] It is also preferred that the solvent for the biodegradable polymer be non-toxic, water miscible, and otherwise biocompatible. Examples of such solvents include, but are not limited to, N-methyl-2-pyrrolidone, 2-pyrrolidone, C2 to C6 alkanols, C1 to C15 alchohols, dils, triols, and tetraols such as ethanol, glycerine propylene glycol, butanol; C3 to C15 alkyl ketones such as acetone, diethyl ketone and methyl ethyl ketone; C3 to C15 esters such as methyl acetate, ethyl acetate, ethyl lactate; alkyl ketones such as methyl ethyl ketone, C1 to C15 amides such as dimethylformamide, dimethylacetamide and caprolactam; C3 to C20 ethers such as tetrahydrofuran, or solketal; tweens, triacetin, propylene carbonate, decylmethylsulfoxide, dimethyl sulfoxide, oleic acid, 1-dodecylazacycloheptan-2-one, Other preferred solvents are benzyl alchohol, benzyl benzoate, dipropylene glycol, tributyrin, ethyl oleate, glycerin, glycofural, isopropyl myristate, isopropyl palmitate, oleic acid, polyethylene glycol, propylene carbonate, and triethyl citrate. The most preferred solvents are N-methyl-2-pyrrolidone, 2-pyrrolidone, dimethyl sulfoxide, triacetin, and propylene carbonate because of the solvating ability and their compatibility.

[1937] Additionally, formulations comprising polypeptide, polynucleotide, and antibody compositions and a biodegradable polymer may also include release-rate modification agents and/or pore-forming agents. Examples of release-rate modification agents include, but are not limited to, fatty acids, triglycerides, other like hydrophobic compounds, organic solvents, plasticizing compounds and hydrophilic compounds. Suitable release rate modification agents include, for example, esters of mono-, di-, and tricarboxylic acids, such as 2-ethoxyethyl acetate, methyl acetate, ethyl acetate, diethyl phthalate, dimethyl phthalate, dibutyl phthalate, dimethyl adipate, dimethyl succinate, dimethyl oxalate, dimethyl citrate, triethyl citrate, acetyl tributyl citrate, acetyl triethyl citrate, glycerol triacetate, di(n-butyl) sebecate, and the like; polyhydroxy alcohols, such as propylene glycol, polyethylene glycol, glycerin, sorbitol, and the like; fatty acids; triesters of glycerol, such as triglycerides, epoxidized soybean oil, and other epoxidized vegetable oils; sterols, such as cholesterol; alcohols, such as C.sub.6-C.sub.12 alkanols, 2-ethoxyethanol. The release rate modification agent may be used singly or in combination with other such agents. Suitable combinations of release rate modification agents include, but are not limited to, glycerin/propylene glycol, sorbitol/glycerine, ethylene oxide/propylene oxide, butylene glycol/adipic acid, and the like. Preferred release rate modification agents include, but are not limited to, dimethyl citrate, triethyl citrate, ethyl heptanoate, glycerin, and hexanediol. Suitable pore-forming agents that may be used in the polymer composition include, but are not limited to, sugars such as sucrose and dextrose, salts such as sodium chloride and sodium carbonate, polymers such as hydroxylpropylcellulose, carboxymethylcellulose, polyethylene glycol, and polyvinylpyrrolidone. Solid crystals that will provide a defined pore size, such as salt or sugar, are preferred.

[1938] In specific preferred embodiments the polypeptide, polynucleotide, and antibody compositions of the invention are formulated using the BEMA™ BioErodible Mucoadhesive System, MCA™ MucoCutaneous Absorption System, SMP™ Solvent MicroParticle System, or BCP™ BioCompatible Polymer System of Atrix Laboratories, Inc. (Fort Collins, Colo.).

[1939] Sustained-release Therapeutics also include liposomally entrapped Therapeutics of the invention (see generally, Langer, Science 249:1527-1533 (1990); Treat et al., in Liposomes in the Therapy of Infectious Disease and Cancer, Lopez-Berestein and Fidler (eds.), Liss, New York, pp. 317-327 and 353-365 (1989)). Liposomes containing the Therapeutic are prepared by methods known per se: DE 3,218,121; Epstein et al., Proc. Natl. Acad. Sci. (USA) 82:3688-3692 (1985); Hwang et al., Proc. Natl. Acad. Sci. (USA) 77:4030-4034 (1980); EP 52,322; EP 36,676; EP 88,046; EP 143,949; EP 142,641; Japanese Pat. Appl. 83-118008; U.S. Pat. Nos. 4,485,045 and 4,544,545; and EP 102,324. Ordinarily, the liposomes are of the small (about 200-800 Angstroms) unilamellar type in which the lipid content is greater than about 30 mol. percent cholesterol, the selected proportion being adjusted for the optimal Therapeutic.

[1940] In yet an additional embodiment, the Therapeutics of the invention are delivered by way of a pump (see Langer, supra; Sefton, CRC Crit. Ref. Biomed. Eng. 14:201 (1987); Buchwald et al., Surgery 88:507 (1980); Saudek et al., N. Engl. J. Med. 321:574 (1989)).

[1941] Other controlled release systems are discussed in the review by Langer (Science 249:1527-1533 (1990)).

[1942] For parenteral administration, in one embodiment, the Therapeutic is formulated generally by mixing it at the desired degree of purity, in a unit dosage injectable form (solution, suspension, or emulsion), with a pharmaceutically acceptable carrier, i.e., one that is non-toxic to recipients at the dosages and concentrations employed and is compatible with other ingredients of the formulation. For example, the formulation preferably does not include oxidizing agents and other compounds that are known to be deleterious to the Therapeutic.

[1943] Generally, the formulations are prepared by contacting the Therapeutic uniformly and intimately with liquid carriers or finely divided solid carriers or both. Then, if necessary, the product is shaped into the desired formulation. Preferably the carrier is a parenteral carrier, more preferably a solution that is isotonic with the blood of the recipient. Examples of such carrier vehicles include water, saline, Ringer's solution, and dextrose solution. Non-aqueous vehicles such as fixed oils and ethyl oleate are also useful herein, as well as liposomes.

[1944] The carrier suitably contains minor amounts of additives such as substances that enhance isotonicity and chemical stability. Such materials are non-toxic to recipients at the dosages and concentrations employed, and include buffers such as phosphate, citrate, succinate, acetic acid, and other organic acids or their salts; antioxidants such as ascorbic acid; low molecular weight (less than about ten residues) polypeptides, e.g., polyarginine or tripeptides; proteins, such as serum albumin, gelatin, or immunoglobulins; hydrophilic polymers such as polyvinylpyrrolidone; amino acids, such as glycine, glutamic acid, aspartic acid, or arginine; monosaccharides, disaccharides, and other carbohydrates including cellulose or its derivatives, glucose, manose, or dextrins; chelating agents such as EDTA; sugar alcohols such as mannitol or sorbitol; counterions such as sodium; and/or nonionic surfactants such as polysorbates, poloxamers, or PEG.

[1945] The Therapeutic is typically formulated in such vehicles at a concentration of about 0.1 mg/ml to 100 mg/ml, preferably 1-10 mg/ml, at a pH of about 3 to 8. It will be understood that the use of certain of the foregoing excipients, carriers, or stabilizers will result in the formation of polypeptide salts.

[1946] Any pharmaceutical used for therapeutic administration can be sterile. Sterility is readily accomplished by filtration through sterile filtration membranes (e.g., 0.2 micron membranes). Therapeutics generally are placed into a container having a sterile access port, for example, an intravenous solution bag or vial having a stopper pierceable by a hypodermic injection needle.

[1947] Therapeutics ordinarily will be stored in unit or multi-dose containers, for example, sealed ampoules or vials, as an aqueous solution or as a lyophilized formulation for reconstitution. As an example of a lyophilized formulation, 10-ml vials are filled with 5 ml of sterile-filtered 1% (w/v) aqueous Therapeutic solution, and the resulting mixture is lyophilized. The infusion solution is prepared by reconstituting the lyophilized Therapeutic using bacteriostatic Water-for-Injection.

[1948] The invention also provides a pharmaceutical pack or kit comprising one or more containers filled with one or more of the ingredients of the Therapeutics of the invention. Associated with such container(s) can be a notice in the form prescribed by a governmental agency regulating the manufacture, use or sale of pharmaceuticals or biological products, which notice reflects approval by the agency of manufacture, use or sale for human administration. In addition, the Therapeutics may be employed in conjunction with other therapeutic compounds.

[1949] The Therapeutics of the invention may be administered alone or in combination with adjuvants. Adjuvants that may be administered with the Therapeutics of the invention include, but are not limited to, alum, alum plus deoxycholate (ImmunoAg), MTP-PE (Biocine Corp.), QS21 (Genentech, Inc.), BCG (e.g., THERACYS®), MPL and nonviable prepartions of Corynebacterium parvum. In a specific embodiment, Therapeutics of the invention are administered in combination with alum. In another specific embodiment, Therapeutics of the invention are administered in combination with QS-21. Further adjuvants that may be administered with the Therapeutics of the invention include, but are not limited to, Monophosphoryl lipid immunomodulator, AdjuVax 100a, QS-21, QS-18, CRL1005, Aluminum salts, MF-59, and Virosomal adjuvant technology. Vaccines that may be administered with the Therapeutics of the invention include, but are not limited to, vaccines directed toward protection against MMR (measles, mumps, rubella), polio, varicella, tetanus/diptheria, hepatitis A, hepatitis B, haemophilus influenzae B, whooping cough, pneumonia, influenza, Lyme's Disease, rotavirus, cholera, yellow fever, Japanese encephalitis, poliomyelitis, rabies, typhoid fever, and pertussis. Combinations may be administered either concomitantly, e.g., as an admixture, separately but simultaneously or concurrently; or sequentially. This includes presentations in which the combined agents are administered together as a therapeutic mixture, and also procedures in which the combined agents are administered separately but simultaneously, e.g., as through separate intravenous lines into the same individual. Administration “in combination” further includes the separate administration of one of the compounds or agents given first, followed by the second.

[1950] The Therapeutics of the invention may be administered alone or in combination with other therapeutic agents. Therapeutic agents that may be administered in combination with the Therapeutics of the invention, include but not limited to, chemotherapeutic agents, antibiotics, steroidal and non-steroidal anti-inflammatories, conventional immunotherapeutic agents, and/or therapeutic treatments described below. Combinations may be administered either concomitantly, e.g., as an admixture, separately but simultaneously or concurrently; or sequentially. This includes presentations in which the combined agents are administered together as a therapeutic mixture, and also procedures in which the combined agents are administered separately but simultaneously, e.g., as through separate intravenous lines into the same individual. Administration “in combination” further includes the separate administration of one of the compounds or agents given first, followed by the second.

[1951] In one embodiment, the Therapeutics of the invention are administered in combination with an anticoagulant. Anticoagulants that may be administered with the compositions of the invention include, but are not limited to, heparin, low molecular weight heparin, warfarin sodium (e.g., COUMADIN®), dicumarol, 4-hydroxycoumarin, anisindione (e.g., MIRADON™), acenocoumarol (e.g., nicoumalone, SINTHROME™), indan-1,3-dione, phenprocoumon (e.g., MARCUMAR™), ethyl biscoumacetate (e.g., TROMEXAN™), and aspirin. In a specific embodiment, compositions of the invention are administered in combination with heparin and/or warfarin. In another specific embodiment, compositions of the invention are administered in combination with warfarin. In another specific embodiment, compositions of the invention are administered in combination with warfarin and aspirin. In another specific embodiment, compositions of the invention are administered in combination with heparin. In another specific embodiment, compositions of the invention are administered in combination with heparin and aspirin.

[1952] In another embodiment, the Therapeutics of the invention are administered in combination with thrombolytic drugs. Thrombolytic drugs that may be administered with the compositions of the invention include, but are not limited to, plasminogen, lys-plasminogen, alpha2-antiplasmin, streptokinae (e.g., KABIKINASE™), antiresplace (e.g., EMINASE™), tissue plasminogen activator (t-PA, altevase, ACTIVASE™), urokinase (e.g., ABBOKINASE™), sauruplase, (Prourokinase, single chain urokinase), and aminocaproic acid (e.g., AMICAR™). In a specific embodiment, compositions of the invention are administered in combination with tissue plasminogen activator and aspirin.

[1953] In another embodiment, the Therapeutics of the invention are administered in combination with antiplatelet drugs. Antiplatelet drugs that may be administered with the compositions of the invention include, but are not limited to, aspirin, dipyridamole (e.g., PERSANTINE™), and ticlopidine (e.g., TICLID™).

[1954] In specific embodiments, the use of anti-coagulants, thrombolytic and/or antiplatelet drugs in combination with Therapeutics of the invention is contemplated for the prevention, diagnosis, and/or treatment of thrombosis, arterial thrombosis, venous thrombosis, thromboembolism, pulmonary embolism, atherosclerosis, myocardial infarction, transient ischemic attack, unstable angina. In specific embodiments, the use of anticoagulants, thrombolytic drugs and/or antiplatelet drugs in combination with Therapeutics of the invention is contemplated for the prevention of occulsion of saphenous grafts, for reducing the risk of periprocedural thrombosis as might accompany angioplasty procedures, for reducing the risk of stroke in patients with atrial fibrillation including nonrheumatic atrial fibrillation, for reducing the risk of embolism associated with mechanical heart valves and or mitral valves disease. Other uses for the therapeutics of the invention, alone or in combination with antiplatelet, anticoagulant, and/or thrombolytic drugs, include, but are not limited to, the prevention of occlusions in extracorporeal devices (e.g., intravascular canulas, vascular access shunts in hemodialysis patients, hemodialysis machines, and cardiopulmonary bypass machines).

[1955] In certain embodiments, Therapeutics of the invention are administered in combination with antiretroviral agents, nucleoside/nucleotide reverse transcriptase inhibitors (NRTIs), non-nucleoside reverse transcriptase inhibitors (NNRTIs), and/or protease inhibitors (PIs). NRTIs that may be administered in combination with the Therapeutics of the invention, include, but are not limited to, RETROVIR™ (zidovudine/AZT), VIDEX™ (didanosine/ddI), HIVID™ (zalcitabine/ddC), ZERIT™ (stavudine/d4T), EPIVIR™ (lamivudine/3TC), and COMBIVIR™ (zidovudine/lamivudine). NNRTIs that may be administered in combination with the Therapeutics of the invention, include, but are not limited to, VIRAMUNE™ (nevirapine), RESCRIPTOR™ (delavirdine), and SUSTIVA™ (efavirenz). Protease inhibitors that may be administered in combination with the Therapeutics of the invention, include, but are not limited to, CRIXIVAN™ (indinavir), NORVIR™ (ritonavir), INVIRASE™ (saquinavir), and VIRACEPT™ (nelfinavir). In a specific embodiment, antiretroviral agents, nucleoside reverse transcriptase inhibitors, non-nucleoside reverse transcriptase inhibitors, and/or protease inhibitors may be used in any combination with Therapeutics of the invention to treat AIDS and/or to prevent or treat HIV infection.

[1956] Additional NRTIs include LODENOSINE™ (F-ddA; an acid-stable adenosine NRTI; Triangle/Abbott; COVIRACIL™ (emtricitabine/FTC; structurally related to lamivudine (3TC) but with 3- to 10-fold greater activity in vitro; Triangle/Abbott); dOTC (BCH-10652, also structurally related to lamivudine but retains activity against a substantial proportion of lamivudine-resistant isolates; Biochem Pharma); Adefovir (refused approval for anti-HIV therapy by FDA; Gilead Sciences); PREVEON® (Adefovir Dipivoxil, the active prodrug of adefovir; its active form is PMEA-pp); TENOFOVIR™ (bis-POC PMPA, a PMPA prodrug; Gilead); DAPD/DXG (active metabolite of DAPD; Triangle/Abbott); D-D4FC (related to 3TC, with activity against AZT/3TC-resistant virus); GW420867X (Glaxo Wellcome); ZIAGEN™ (abacavir/159U89; Glaxo Wellcome Inc.); CS-87 (3′azido-2′,3′-dideoxyuridine; WO 99/66936); and S-acyl-2-thioethyl (SATE)-bearing prodrug forms of β-L-FD4C and β-L-FddC (WO 98/17281).

[1957] Additional NNRTIs include COACTINON™ (Emivirine/MKC-442, potent NNRTI of the HEPT class; Triangle/Abbott); CAPRAVIRINE™ (AG-1549/S-1153, a next generation NNRTI with activity against viruses containing the K103N mutation; Agouron); PNU-142721 (has 20- to 50-fold greater activity than its predecessor delavirdine and is active against K103N mutants; Pharmacia & Upjohn); DPC-961 and DPC-963 (second-generation derivatives of efavirenz, designed to be active against viruses with the K103N mutation; DuPont); GW-420867X (has 25-fold greater activity than HBY097 and is active against K103N mutants; Glaxo Wellcome); CALANOLIDE A (naturally occurring agent from the latex tree; active against viruses containing either or both the Y181C and K103N mutations); and Propolis (WO 99/49830).

[1958] Additional protease inhibitors include LOPINAVIR™ (ABT378/r; Abbott Laboratories); BMS-232632 (an azapeptide; Bristol-Myres Squibb); TIPRANAVIR™ (PNU-140690, a non-peptic dihydropyrone; Pharmacia & Upjohn); PD-178390 (a nonpeptidic dihydropyrone; Parke-Davis); BMS 232632 (an azapeptide; Bristol-Myers Squibb); L-756,423 (an indinavir analog; Merck); DMP-450 (a cyclic urea compound; Avid & DuPont); AG-1776 (a peptidomimetic with in vitro activity against protease inhibitor-resistant viruses; Agouron); VX-175/GW-433908 (phosphate prodrug of amprenavir; Vertex & Glaxo Welcome); CGP61755 (Ciba); and AGENERASE™ (amprenavir; Glaxo Wellcome Inc.).

[1959] Additional antiretroviral agents include fusion inhibitors/gp41 binders. Fusion inhibitors/gp41 binders include T-20 (a peptide from residues 643-678 of the HIV gp41 transmembrane protein ectodomain which binds to gp41 in its resting state and prevents transformation to the fusogenic state; Trimeris) and T-1249 (a second-generation fusion inhibitor; Trimeris).

[1960] Additional antiretroviral agents include fusion inhibitors/chemokine receptor antagonists. Fusion inhibitors/chemokine receptor antagonists include CXCR4 antagonists such as AMD 3100 (a bicyclam), SDF-1 and its analogs, and ALX40-4C (a cationic peptide), T22 (an 18 amino acid peptide; Trimeris) and the T22 analogs T134 and T140; CCR5 antagonists such as RANTES (9-68), AOP-RANTES, NNY-RANTES, and TAK-779; and CCR5/CXCR4 antagonists such as NSC 651016 (a distamycin analog). Also included are CCR2B, CCR3, and CCR6 antagonists. Chemokine recpetor agonists such as RANTES, SDF-1, MIP-1α, MIP-1β, etc., may also inhibit fusion.

[1961] Additional antiretroviral agents include integrase inhibitors. Integrase inhibitors include dicaffeoylquinic (DFQA) acids; L-chicoric acid (a dicaffeoyltartaric (DCTA) acid); quinalizarin (QLC) and related anthraquinones; ZINTEVIR™ (AR 177, an oligonucleotide that probably acts at cell surface rather than being a true integrase inhibitor; Arondex); and naphthols such as those disclosed in WO 98/50347.

[1962] Additional antiretroviral agents include hydroxyurea-like compunds such as BCX-34 (a purine nucleoside phosphorylase inhibitor; Biocryst); ribonucleotide reductase inhibitors such as DIDOX™ (Molecules for Health); inosine monophosphate dehydrogenase (IMPDH) inhibitors sucha as VX-497 (Vertex); and mycopholic acids such as CellCept (mycophenolate mofetil; Roche).

[1963] Additional antiretroviral agents include inhibitors of viral integrase, inhibitors of viral genome nuclear translocation such as arylene bis(methylketone) compounds; inhibitors of HIV entry such as AOP-RANTES, NNY-RANTES, RANTES-IgG fusion protein, soluble complexes of RANTES and glycosaminoglycans (GAG), and AMD-3100; nucleocapsid zinc finger inhibitors such as dithiane compounds; targets of HIV Tat and Rev; and pharmacoenhancers such as ABT-378.

[1964] Other antiretroviral therapies and adjunct therapies include cytokines and lymphokines such as MIP-1α, MIP-1β, SDF-1α, IL-2, PROLEUKIN™ (aldesleukin/L2-7001; Chiron), IL-4, IL-10, IL-12, and IL-13; interferons such as IFN-α2a; antagonists of TNFs, NFκB, GM-CSF, M-CSF, and IL-10; agents that modulate immune activation such as cyclosporin and prednisone; vaccines such as Remune™ (HIV Immunogen), APL 400-003 (Apollon), recombinant gp120 and fragments, bivalent (B/E) recombinant envelope glycoprotein, rgp120CM235, MN rgp120, SF-2 rgp120, gp120/soluble CD4 complex, Delta JR-FL protein, branched synthetic peptide derived from discontinuous gp120 C3/C4 domain, fusion-competent immunogens, and Gag, Pol, Nef, and Tat vaccines; gene-based therapies such as genetic suppressor elements (GSEs; WO 98/54366), and intrakines (genetically modified CC chemokines targetted to the ER to block surface expression of newly synthesized CCR5 (Yang et al., PNAS 94:11567-72 (1997); Chen et al., Nat. Med. 3:1110-16 (1997)); antibodies such as the anti-CXCR4 antibody 12G5, the anti-CCR5 antibodies 2D7, 5C7, PA8, PA9, PA10, PA11, PA12, and PA14, the anti-CD4 antibodies Q4120 and RPA-T4, the anti-CCR3 antibody 7B11, the anti-gp120 antibodies 17b, 48d, 447-52D, 257-D, 268-D and 50.1, anti-Tat antibodies, anti-TNF-α antibodies, and monoclonal antibody 33A; aryl hydrocarbon (AH) receptor agonists and antagonists such as TCDD, 3,3′,4,4′,5-pentachlorobiphenyl, 3,3′,4,4′-tetrachlorobiphenyl, and α-naphthoflavone (WO 98/30213); and antioxidants such as γ-L-glutamyl-L-cysteine ethyl ester (γ-GCE; WO 99/56764).

[1965] In a further embodiment, the Therapeutics of the invention are administered in combination with an antiviral agent. Antiviral agents that may be administered with the Therapeutics of the invention include, but are not limited to, acyclovir, ribavirin, amantadine, and remantidine.

[1966] In other embodiments, Therapeutics of the invention may be administered in combination with anti-opportunistic infection agents. Anti-opportunistic agents that may be administered in combination with the Therapeutics of the invention, include, but are not limited to, TRIMETHOPRIM-SULFAMETHOXAZOLE™, DAPSONE™, PENTAMIDINE™, ATOVAQUONE™, ISONIAZID™, RIFAMPIN™, PYRAZINAMIDE™, ETHAMBUTOL™, RIFABUTIN™, CLARITHROMYCIN™, AZITHROMYCIN™, GANCICLOVIR™, FOSCARNET™, CIDOFOVIR™, FLUCONAZOLE™, ITRACONAZOLE™, KETOCONAZOLE™, ACYCLOVIR™, FAMCICOLVIR™, PYRIMETHAMINE™, LEUCOVORIN™, NEUPOGEN™ (filgrastim/G-CSF), and LEUKINE™ (sargramostim/GM-CSF). In a specific embodiment, Therapeutics of the invention are used in any combination with TRIMETHOPRIM-SULFAMETHOXAZOLE™, DAPSONE™, PENTAMIDINE™, and/or ATOVAQUONE™ to prophylactically treat or prevent an opportunistic Pneumocystis carinii pneumonia infection. In another specific embodiment, Therapeutics of the invention are used in any combination with ISONIAZID™, RIFAMPIN™, PYRAZINAMIDE™, and/or ETHAMBUTOL™ to prophylactically treat or prevent an opportunistic Mycobacterium avium complex infection. In another specific embodiment, Therapeutics of the invention are used in any combination with RIFABUTIN™, CLARITHROMYCIN™, and/or AZITHROMYCIN™ to prophylactically treat or prevent an opportunistic Mycobacterium tuberculosis infection. In another specific embodiment, Therapeutics of the invention are used in any combination with GANCICLOVIR™, FOSCARNET™, and/or CIDOFOVIR™ to prophylactically treat or prevent an opportunistic cytomegalovirus infection. In another specific embodiment, Therapeutics of the invention are used in any combination with FLUCONAZOLE™, ITRACONAZOLE™, and/or KETOCONAZOLE™ to prophylactically treat or prevent an opportunistic fungal infection. In another specific embodiment, Therapeutics of the invention are used in any combination with ACYCLOVIR™ and/or FAMCICOLVIR™ to prophylactically treat or prevent an opportunistic herpes simplex virus type I and/or type II infection. In another specific embodiment, Therapeutics of the invention are used in any combination with PYRIMETHAMINE™ and/or LEUCOVORIN™ to prophylactically treat or prevent an opportunistic Toxoplasma gondii infection. In another specific embodiment, Therapeutics of the invention are used in any combination with LEUCOVORIN™ and/or NEUPOGEN™ to prophylactically treat or prevent an opportunistic bacterial infection.

[1967] In a further embodiment, the Therapeutics of the invention are administered in combination with an antibiotic agent. Antibiotic agents that may be administered with the Therapeutics of the invention include, but are not limited to, amoxicillin, beta-lactamases, aminoglycosides, beta-lactam (glycopeptide), beta-lactamases, Clindamycin, chloramphenicol, cephalosporins, ciprofloxacin, erythromycin, fluoroquinolones, macrolides, metronidazole, penicillins, quinolones, rapamycin, rifampin, streptomycin, sulfonamide, tetracyclines, trimethoprim, trimethoprim-sulfamethoxazole, and vancomycin.

[1968] In other embodiments, the Therapeutics of the invention are administered in combination with immunestimulants. Immunostimulants that may be administered in combination with the Therapeutics of the invention include, but are not limited to, levamisole (e.g., ERGAMISOL™), isoprinosine (e.g. INOSIPLEX™), interferons (e.g. interferon alpha), and interleukins (e.g., IL-2).

[1969] In other embodiments, Therapeutics of the invention are administered in combination with immunosuppressive agents. Immunosuppressive agents that may be administered in combination with the Therapeutics of the invention include, but are not limited to, steroids, cyclosporine, cyclosporine analogs, cyclophosphamide methylprednisone, prednisone, azathioprine, FK-506, 15-deoxyspergualin, and other immunosuppressive agents that act by suppressing the function of responding T cells. Other immunosuppressive agents that may be administered in combination with the Therapeutics of the invention include, but are not limited to, prednisolone, methotrexate, thalidomide, methoxsalen, rapamycin, leflunomide, mizoribine (BREDININ™), brequinar, deoxyspergualin, and azaspirane (SKF 105685), ORTHOCLONE OKT® 3 (muromonab-CD3), SANDIMMUNE™, NEORAL™, SANGDYA™ (cyclosporine), PROGRAF® (FK506, tacrolimus), CELLCEPT® (mycophenolate motefil, of which the active metabolite is mycophenolic acid), IMURAN™ (azathioprine), glucocorticosteroids, adrenocortical steroids such as DELTASONE™ (prednisone) and HYDELTRASOL™ (prednisolone), FOLEX™ and MEXATE™ (methotrxate), OXSORALEN-ULTRA™ (methoxsalen) and RAPAMUNE™ (sirolimus). In a specific embodiment, immunosuppressants may be used to prevent rejection of organ or bone marrow transplantation.

[1970] In an additional embodiment, Therapeutics of the invention are administered alone or in combination with one or more intravenous immune globulin preparations. Intravenous immune globulin preparations that may be administered with the Therapeutics of the invention include, but not limited to, GAMMAR™, IVEEGAM™, SANDOGLOBULIN™, GAMMAGARD S/D™, ATGAM™ (antithymocyte glubulin), and GAMIMUNE™. In a specific embodiment, Therapeutics of the invention are administered in combination with intravenous immune globulin preparations in transplantation therapy (e.g., bone marrow transplant).

[1971] In certain embodiments, the Therapeutics of the invention are administered alone or in combination with an anti-inflammatory agent. Anti-inflammatory agents that may be administered with the Therapeutics of the invention include, but are not limited to, corticosteroids (e.g. betamethasone, budesonide, cortisone, dexamethasone, hydrocortisone, methylprednisolone, prednisolone, prednisone, and triamcinolone), nonsteroidal anti-inflammatory drugs (e.g., diclofenac, diflunisal, etodolac, fenoprofen, floctafenine, flurbiprofen, ibuprofen, indomethacin, ketoprofen, meclofenamate, mefenamic acid, meloxicam, nabumetone, naproxen, oxaprozin, phenylbutazone, piroxicam, sulindac, tenoxicam, tiaprofenic acid, and tolmetin.), as well as antihistamines, aminoarylcarboxylic acid derivatives, arylacetic acid derivatives, arylbutyric acid derivatives, arylcarboxylic acids, arylpropionic acid derivatives, pyrazoles, pyrazolones, salicylic acid derivatives, thiazinecarboxamides, e-acetamidocaproic acid, S-adenosylmethionine, 3-amino-4-hydroxybutyric acid, amixetrine, bendazac, benzydamine, bucolome, difenpiramide, ditazol, emorfazone, guaiazulene, nabumetone, nimesulide, orgotein, oxaceprol, paranyline, perisoxal, pifoxime, proquazone, proxazole, and tenidap.

[1972] In an additional embodiment, the compositions of the invention are administered alone or in combination with an anti-angiogenic agent. Anti-angiogenic agents that may be administered with the compositions of the invention include, but are not limited to, Angiostatin (Entremed, Rockville, Md.), Troponin-1 (Boston Life Sciences, Boston, Mass.), anti-Invasive Factor, retinoic acid and derivatives thereof, paclitaxel (Taxol), Suramin, Tissue Inhibitor of Metalloproteinase-1, Tissue Inhibitor of Metalloproteinase-2, VEGI, Plasminogen Activator Inhibitor-1, Plasminogen Activator Inhibitor-2, and various forms of the lighter “d group” transition metals.

[1973] Lighter “d group” transition metals include, for example, vanadium, molybdenum, tungsten, titanium, niobium, and tantalum species. Such transition metal species may form transition metal complexes. Suitable complexes of the above-mentioned transition metal species include oxo transition metal complexes.

[1974] Representative examples of vanadium complexes include oxo vanadium complexes such as vanadate and vanadyl complexes. Suitable vanadate complexes include metavanadate and orthovanadate complexes such as, for example, ammonium metavanadate, sodium metavanadate, and sodium orthovanadate. Suitable vanadyl complexes include, for example, vanadyl acetylacetonate and vanadyl sulfate including vanadyl sulfate hydrates such as vanadyl sulfate mono- and trihydrates.

[1975] Representative examples of tungsten and molybdenum complexes also include oxo complexes. Suitable oxo tungsten complexes include tungstate and tungsten oxide complexes. Suitable tungstate complexes include ammonium tungstate, calcium tungstate, sodium tungstate dihydrate, and tungstic acid. Suitable tungsten oxides include tungsten (IV) oxide and tungsten (VI) oxide. Suitable oxo molybdenum complexes include molybdate, molybdenum oxide, and molybdenyl complexes. Suitable molybdate complexes include ammonium molybdate and its hydrates, sodium molybdate and its hydrates, and potassium molybdate and its hydrates. Suitable molybdenum oxides include molybdenum (VI) oxide, molybdenum (VI) oxide, and molybdic acid. Suitable molybdenyl complexes include, for example, molybdenyl acetylacetonate. Other suitable tungsten and molybdenum complexes include hydroxo derivatives derived from, for example, glycerol, tartaric acid, and sugars.

[1976] A wide variety of other anti-angiogenic factors may also be utilized within the context of the present invention. Representative examples include, but are not limited to, platelet factor 4; protamine sulphate; sulphated chitin derivatives (prepared from queen crab shells), (Murata et al., Cancer Res. 51:22-26, (1991)); Sulphated Polysaccharide Peptidoglycan Complex (SP-PG) (the function of this compound may be enhanced by the presence of steroids such as estrogen, and tamoxifen citrate); Staurosporine; modulators of matrix metabolism, including for example, proline analogs, cishydroxyproline, d,L-3,4-dehydroproline, Thiaproline, alpha,alpha-dipyridyl, aminopropionitrile fumarate; 4-propyl-5-(4-pyridinyl)-2 (3H)-oxazolone; Methotrexate; Mitoxantrone; Heparin; Interferons; 2 Macroglobulin-serum; ChIMP-3 (Pavloff et al., J. Bio. Chem. 267:17321-17326, (1992)); Chymostatin (Tomkinson et al., Biochem J. 286:475-480, (1992)); Cyclodextrin Tetradecasulfate; Eponemycin; Camptothecin; Fumagillin (Ingber et al., Nature 348:555-557, (1990)); Gold Sodium Thiomalate (“GST”; Matsubara and Ziff, J. Clin. Invest. 79:1440-1446, (1987)); anticollagenase-serum; alpha2-antiplasmin (Holmes et al., J. Biol. Chem. 262(4):1659-1664, (1987)); Bisantrene (National Cancer Institute); Lobenzarit disodium (N-(2)-carboxyphenyl-4-chloroanthronilic acid disodium or “CCA”; (Takeuchi et al., Agents Actions 36:312-316, (1992)); and metalloproteinase inhibitors such as BB94.

[1977] Additional anti-angiogenic factors that may also be utilized within the context of the present invention include Thalidomide, (Celgene, Warren, N.J.); Angiostatic steroid; AGM-1470 (H. Brem and J. Folkman J Pediatr. Surg. 28:445-51 (1993)); an integrin alpha v beta 3 antagonist (C. Storgard et al., J Clin. Invest. 103:47-54 (1999)); carboxynaminolmidazole; Carboxyamidotriazole (CAI) (National Cancer Institute, Bethesda, Md.); Conbretastatin A-4 (CA4P) (OXiGENE, Boston, Mass.); Squalamine (Magainin Pharmaceuticals, Plymouth Meeting, Pa.); TNP-470, (Tap Pharmaceuticals, Deerfield, Ill.); ZD-0101 AstraZeneca (London, UK); APRA (CT2584); Benefin, Byrostatin-1 (SC339555); CGP-41251 (PKC 412); CM101; Dexrazoxane (ICRF187); DMXAA; Endostatin; Flavopridiol; Genestein; GTE; ImmTher; Iressa (ZD1839); Octreotide (Somatostatin); Panretin; Penacillamine; Photopoint; PI-88; Prinomastat (AG-3340) Purlytin; Suradista (FCE26644); Tamoxifen (Nolvadex); Tazarotene; Tetrathiomolybdate; Xeloda (Capecitabine); and 5-Fluorouracil.

[1978] Anti-angiogenic agents that may be administed in combination with the compounds of the invention may work through a variety of mechanisms including, but not limited to, inhibiting proteolysis of the extracellular matrix, blocking the function of endothelial cell-extracellular matrix adhesion molecules, by antagonizing the function of angiogenesis inducers such as growth factors, and inhibiting integrin receptors expressed on proliferating endothelial cells. Examples of anti-angiogenic inhibitors that interfere with extracellular matrix proteolysis and which may be administered in combination with the compositons of the invention include, but are not lmited to, AG-3340 (Agouron, La Jolla, Calif.), BAY-12-9566 (Bayer, West Haven, Conn.), BMS-275291 (Bristol Myers Squibb, Princeton, N.J.), CGS-27032A (Novartis, East Hanover, N.J.), Marimastat (British Biotech, Oxford, UK), and Metastat (Aetema, St-Foy, Quebec). Examples of anti-angiogenic inhibitors that act by blocking the function of endothelial cell-extracellular matrix adhesion molecules and which may be administered in combination with the compositons of the invention include, but are not lmited to, EMD-121974 (Merck KcgaA Darmstadt, Germany) and Vitaxin (Ixsys, La Jolla, Calif./Medimmune, Gaithersburg, Md.). Examples of anti-angiogenic agents that act by directly antagonizing or inhibiting angiogenesis inducers and which may be administered in combination with the compositons of the invention include, but are not lmited to, Angiozyme (Ribozyme, Boulder, Colo.), Anti-VEGF antibody (Genentech, S. San Francisco, Calif.), PTK-787/ZK-225846 (Novartis, Basel, Switzerland), SU-101 (Sugen, S. San Francisco, Calif.), SU-5416 (Sugen/Pharmacia Upjohn, Bridgewater, N.J.), and SU-6668 (Sugen). Other anti-angiogenic agents act to indirectly inhibit angiogenesis. Examples of indirect inhibitors of angiogenesis which may be administered in combination with the compositons of the invention include, but are not limited to, IM-862 (Cytran, Kirkland, Wash.), Interferon-alpha, IL-12 (Roche, Nutley, N.J.), and Pentosan polysulfate (Georgetown University, Washington, D.C.).

[1979] In particular embodiments, the use of compositions of the invention in combination with anti-angiogenic agents is contemplated for the treatment, prevention, and/or amelioration of an autoimmune disease, such as for example, an autoimmune disease described herein.

[1980] In a particular embodiment, the use of compositions of the invention in combination with anti-angiogenic agents is contemplated for the treatment, prevention, and/or amelioration of arthritis. In a more particular embodiment, the use of compositions of the invention in combination with anti-angiogenic agents is contemplated for the treatment, prevention, and/or amelioration of rheumatoid arthritis.

[1981] In another embodiment, the polynucleotides encoding a polypeptide of the present invention are administered in combination with an angiogenic protein, or polynucleotides encoding an angiogenic protein. Examples of angiogenic proteins that may be administered with the compositions of the invention include, but are not limited to, acidic and basic fibroblast growth factors, VEGF-1, VEGF-2, VEGF-3, epidermal growth factor alpha and beta, platelet-derived endothelial cell growth factor, platelet-derived growth factor, tumor necrosis factor alpha, hepatocyte growth factor, insulin-like growth factor, colony stimulating factor, macrophage colony stimulating factor, granulocyte/macrophage colony stimulating factor, and nitric oxide synthase.

[1982] In additional embodiments, compositions of the invention are administered in combination with a chemotherapeutic agent. Chemotherapeutic agents that may be administered with the Therapeutics of the invention include, but are not limited to alkylating agents such as nitrogen mustards (for example, Mechlorethamine, cyclophosphamide, Cyclophosphamide Ifosfamide, Melphalan (L-sarcolysin), and Chlorambucil), ethylenimines and methylmelamines (for example, Hexamethylmelamine and Thiotepa), alkyl sulfonates (for example, Busulfan), nitrosoureas (for example, Carmustine (BCNU), Lomustine (CCNU), Semustine (methyl-CCNU), and Streptozocin (streptozotocin)), triazenes (for example, Dacarbazine (DTIC; dimethyltriazenoimidazolecarboxamide)), folic acid analogs (for example, Methotrexate (amethopterin)), pyrimidine analogs (for example, Fluorouacil (5-fluorouracil; 5-FU), Floxuridine (fluorodeoxyuridine; FudR), and Cytarabine (cytosine arabinoside)), purine analogs and related inhibitors (for example, Mercaptopurine (6-mercaptopurine; 6-MP), Thioguanine (6-thioguanine; TG), and Pentostatin (2′-deoxycoformycin)), vinca alkaloids (for example, Vinblastine (VLB, vinblastine sulfate)) and Vincristine (vincristine sulfate)), epipodophyllotoxins (for example, Etoposide and Teniposide), antibiotics (for example, Dactinomycin (actinomycin D), Daunorubicin (daunomycin; rubidomycin), Doxorubicin, Bleomycin, Plicamycin (mithramycin), and Mitomycin (mitomycin C), enzymes (for example, L-Asparaginase), biological response modifiers (for example, Interferon-alpha and interferon-alpha-2b), platinum coordination compounds (for example, Cisplatin (cis-DDP) and Carboplatin), anthracenedione (Mitoxantrone), substituted ureas (for example, Hydroxyurea), methylhydrazine derivatives (for example, Procarbazine (N-methylhydrazine; MIH), adrenocorticosteroids (for example, Prednisone), progestins (for example, Hydroxyprogesterone caproate, Medroxyprogesterone, Medroxyprogesterone acetate, and Megestrol acetate), estrogens (for example, Diethylstilbestrol (DES), Diethylstilbestrol diphosphate, Estradiol, and Ethinyl estradiol), antiestrogens (for example, Tamoxifen), androgens (Testosterone proprionate, and Fluoxymesterone), antiandrogens (for example, Flutamide), gonadotropin-releasing horomone analogs (for example, Leuprolide), other hormones and hormone analogs (for example, methyltestosterone, estramustine, estramustine phosphate sodium, chlorotrianisene, and testolactone), and others (for example, dicarbazine, glutamic acid, and mitotane).

[1983] In one embodiment, the compositions of the invention are administered in combination with one or more of the following drugs: infliximab (also known as Remicade™ Centocor, Inc.), Trocade (Roche, RO-32-3555), Leflunomide (also known as Arava™ from Hoechst Marion Roussel), Kineret™ (an IL-1 Receptor antagonist also known as Anakinra from Amgen, Inc.)

[1984] In a specific embodiment, compositions of the invention are administered in combination with CHOP (cyclophosphamide, doxorubicin, vincristine, and prednisone) or combination of one or more of the components of CHOP. In one embodiment, the compositions of the invention are administered in combination with anti-CD20 antibodies, human monoclonal anti-CD20 antibodies. In another embodiment, the compositions of the invention are administered in combination with anti-CD20 antibodies and CHOP, or anti-CD20 antibodies and any combination of one or more of the components of CHOP, particularly cyclophosphamide and/or prednisone. In a specific embodiment, compositions of the invention are administered in combination with Rituximab. In a further embodiment, compositions of the invention are administered with Rituximab and CHOP, or Rituximab and any combination of one or more of the components of CHOP, particularly cyclophosphamide and/or prednisone. In a specific embodiment, compositions of the invention are administered in combination with tositumomab. In a further embodiment, compositions of the invention are administered with tositumomab and CHOP, or tositumomab and any combination of one or more of the components of CHOP, particularly cyclophosphamide and/or prednisone. The anti-CD20 antibodies may optionally be associated with radioisotopes, toxins or cytotoxic prodrugs.

[1985] In another specific embodiment, the compositions of the invention are administered in combination Zevalin™. In a further embodiment, compositions of the invention are administered with Zevalin™ and CHOP, or Zevalin™ and any combination of one or more of the components of CHOP, particularly cyclophosphamide and/or prednisone. Zevalin™ may be associated with one or more radisotopes. Particularly preferred isotopes are ⁹⁰Y and ¹¹¹In.

[1986] In an additional embodiment, the Therapeutics of the invention are administered in combination with cytokines. Cytokines that may be administered with the Therapeutics of the invention include, but are not limited to, IL2, IL3, IL4, IL5, IL6, IL7, IL10, IL12, IL13, IL15, anti-CD40, CD40L, IFN-gamma and TNF-alpha. In another embodiment, Therapeutics of the invention may be administered with any interleukin, including, but not limited to, IL-1alpha, IL-1beta, IL-2, IL-3, IL-4, IL-5, IL-6, IL-7, IL-8, IL-9, IL-10, IL-11, IL-12, IL-13, IL-14, IL-15, IL-16, IL-17, IL-18, IL-19, IL-20, and IL-21.

[1987] In one embodiment, the Therapeutics of the invention are administered in combination with members of the TNF family. TNF, TNF-related or TNF-like molecules that may be administered with the Therapeutics of the invention include, but are not limited to, soluble forms of TNF-alpha, lymphotoxin-alpha (LT-alpha, also known as TNF-beta), LT-beta (found in complex heterotrimer LT-alpha2-beta), OPGL, FasL, CD27L, CD30L, CD40L, 4-1BBL, DcR3, OX40L, TNF-gamma (International Publication No. WO 96/14328), AIM-I (International Publication No. WO 97/33899), endokine-alpha (International Publication No. WO 98/07880), OPG, and neutrokine-alpha (International Publication No. WO 98/18921, OX40, and nerve growth factor (NGF), and soluble forms of Fas, CD30, CD27, CD40 and 4-IBB, TR2 (International Publication No. WO 96/34095), DR3 (International Publication No. WO 97/33904), DR4 (International Publication No. WO 98/32856), TR5 (International Publication No. WO 98/30693), TRANK, TR9 (International Publication No. WO 98/56892), TR10 (International Publication No. WO 98/54202), 312C2 (International Publication No. WO 98/06842), and TR12, and soluble forms CD154, CD70, and CD153.

[1988] In an additional embodiment, the Therapeutics of the invention are administered in combination with angiogenic proteins. Angiogenic proteins that may be administered with the Therapeutics of the invention include, but are not limited to, Glioma Derived Growth Factor (GDGF), as disclosed in European Patent Number EP-399816; Platelet Derived Growth Factor-A (PDGF-A), as disclosed in European Patent Number EP-682110; Platelet Derived Growth Factor-B (PDGF-B), as disclosed in European Patent Number EP-282317; Placental Growth Factor (PlGF), as disclosed in International Publication Number WO 92/06194; Placental Growth Factor-2 (PlGF-2), as disclosed in Hauser et al., Growth Factors, 4:259-268 (1993); Vascular Endothelial Growth Factor (VEGF), as disclosed in International Publication Number WO 90/13649; Vascular Endothelial Growth Factor-A (VEGF-A), as disclosed in European Patent Number EP-506477; Vascular Endothelial Growth Factor-2 (VEGF-2), as disclosed in International Publication Number WO 96/39515; Vascular Endothelial Growth Factor B (VEGF-3); Vascular Endothelial Growth Factor B-186 (VEGF-B186), as disclosed in International Publication Number WO 96/26736; Vascular Endothelial Growth Factor-D (VEGF-D), as disclosed in International Publication Number WO 98/02543; Vascular Endothelial Growth Factor-D (VEGF-D), as disclosed in International Publication Number WO 98/07832; and Vascular Endothelial Growth Factor-E (VEGF-E), as disclosed in German Patent Number DE19639601. The above mentioned references are herein incorporated by reference in their entireties.

[1989] In an additional embodiment, the Therapeutics of the invention are administered in combination with Fibroblast Growth Factors. Fibroblast Growth Factors that may be administered with the Therapeutics of the invention include, but are not limited to, FGF-1, FGF-2, FGF-3, FGF-4, FGF-5, FGF-6, FGF-7, FGF-8, FGF-9, FGF-10, FGF-1, FGF-12, FGF-13, FGF-14, and FGF-15.

[1990] In an additional embodiment, the Therapeutics of the invention are administered in combination with hematopoietic growth factors. Hematopoietic growth factors that may be administered with the Therapeutics of the invention include, but are not limited to, granulocyte macrophage colony stimulating factor (GM-CSF) (sargramostim, LEUKINE™, PROKINE™), granulocyte colony stimulating factor (G-CSF) (filgrastim, NEUPOGEN™), macrophage colony stimulating factor (M-CSF, CSF-1) erythropoietin (epoetin alfa, EPOGEN™, PROCRIT™), stem cell factor (SCF, c-kit ligand, steel factor), megakaryocyte colony stimulating factor, PIXY321 (a GMCSF/IL-3 fusion protein), interleukins, especially any one or more of IL-1 through IL-12, interferon-gamma, or thrombopoietin.

[1991] In certain embodiments, Therapeutics of the present invention are administered in combination with adrenergic blockers, such as, for example, acebutolol, atenolol, betaxolol, bisoprolol, carteolol, labetalol, metoprolol, nadolol, oxprenolol, penbutolol, pindolol, propranolol, sotalol, and timolol.

[1992] In another embodiment, the Therapeutics of the invention are administered in combination with an antiarrhythmic drug (e.g., adenosine, amidoarone, bretylium, digitalis, digoxin, digitoxin, diliazem, disopyramide, esmolol, flecainide, lidocaine, mexiletine, moricizine, phenyloin, procainamide, N-acetyl procainamide, propafenone, propranolol, quinidine, sotalol, tocainide, and verapamil).

[1993] In another embodiment, the Therapeutics of the invention are administered in combination with diuretic agents, such as carbonic anhydrase-inhibiting agents (e.g., acetazolamide, dichlorphenamide, and methazolamide), osmotic diuretics (e.g., glycerin, isosorbide, mannitol, and urea), diuretics that inhibit Na⁺-K⁺-2Cl⁻ symport (e.g., furosemide, bumetanide, azosemide, piretanide, tripamide, ethacrynic acid, muzolimine, and torsemide), thiazide and thiazide-like diuretics (e.g., bendroflumethiazide, benzthiazide, chlorothiazide, hydrochlorothiazide, hydroflumethiazide, methyclothiazide, polythiazide, trichormethiazide, chlorthalidone, indapamide, metolazone, and quinethazone), potassium sparing diuretics (e.g., amiloride and triamterene), and mineralcorticoid receptor antagonists (e.g., spironolactone, canrenone, and potassium canrenoate).

[1994] In one embodiment, the Therapeutics of the invention are administered in combination with treatments for endocrine and/or hormone imbalance disorders. Treatments for endocrine and/or hormone imbalance disorders include, but are not limited to, ¹²⁷I, radioactive isotopes of iodine such as ¹³¹I and ¹²³I; recombinant growth hormone, such as HUMATROPE™ (recombinant somatropin); growth hormone analogs such as PROTROPIN™ (somatrem); dopamine agonists such as PARLODEL™ (bromocriptine); somatostatin analogs such as SANDOSTATIN™ (octreotide); gonadotropin preparations such as PREGNYL™, A.P.L™ and PROFASI™ (chorionic gonadotropin (CG)), PERGONAL™ (menotropins), and METRODIN™ (urofollitropin (uFSH)); synthetic human gonadotropin releasing hormone preparations such as FACTREL™ and LUTREPULSE™ (gonadorelin hydrochloride); synthetic gonadotropin agonists such as LUPRON™ (leuprolide acetate), SUPPRELIN™ (histrelin acetate), SYNAREL™ (nafarelin acetate), and ZOLADEX™ (goserelin acetate); synthetic preparations of thyrotropin-releasing hormone such as RELEFACT TRH™ and THYPINONE™ (protirelin); recombinant human TSH such as THYROGEN™; synthetic preparations of the sodium salts of the natural isomers of thyroid hormones such as L-T₄™, SYNTHROID™ and LEVOTHROID™ (levothyroxine sodium), L-T₃™, CYTOMEL™ and TRIOSTAT™ (liothyroine sodium), and THYROLAR™ (liotrix); antithyroid compounds such as 6-n-propylthiouracil (propylthiouracil), 1-methyl-2-mercaptoimidazole and TAPAZOLE™ (methimazole), NEO-MERCAZOLE™ (carbimazole); beta-adrenergic receptor antagonists such as propranolol and esmolol; Ca²⁺ channel blockers; dexamethasone and iodinated radiological contrast agents such as TELEPAQUE™ (iopanoic acid) and ORAGRAFIN™ (sodium ipodate).

[1995] Additional treatments for endocrine and/or hormone imbalance disorders include, but are not limited to, estrogens or congugated estrogens such as ESTRACE™ (estradiol), ESTINYL™ (ethinyl estradiol), PREMARIN™, ESTRATAB™, ORTHO-EST™, OGEN™ and estropipate (estrone), ESTROVIS™ (quinestrol), ESTRADERM™ (estradiol), DELESTROGEN™ and VALERGEN™ (estradiol valerate), DEPO-ESTRADIOL CYPIONATE™ and ESTROJECT LA™ (estradiol cypionate); antiestrogens such as NOLVADEX™ (tamoxifen), SEROPHENE™ and CLOMID™ (clomiphene); progestins such as DURALUTIN™ (hydroxyprogesterone caproate), MPA™ and DEPO-PROVERA™ (medroxyprogesterone acetate), PROVERA™ and CYCRIN™ (MPA), MEGACE™ (megestrol acetate), NORLUTIN™ (norethindrone), and NORLUTATE™ and AYGESTIN™ (norethindrone acetate); progesterone implants such as NORPLANT SYSTEM™ (subdermal implants of norgestrel); antiprogestins such as RU 486™ (mifepristone); hormonal contraceptives such as ENOVID™ (norethynodrel plus mestranol), PROGESTASERT™ (intrauterine device that releases progesterone), LOESTRIN™, BREVICON™, MODICON™, GENORA™, NELONA™, NORINYL™, OVACON-35™ and OVACON-50™ (ethinyl estradiol/norethindrone), LEVLEN™, NORDETTE™, TRI-LEVLEN™ and TRIPHASIL-21™ (ethinyl estradiol/levonorgestrel) LO/OVRAL™ and OVRAL™ (ethinyl estradiol/norgestrel), DEMULEN™ (ethinyl estradiol/ethynodiol diacetate), NORINYL™, ORTHO-NOVUM™, NORETHIN™, GENORA™, and NELOVA™ (norethindrone/mestranol), DESOGEN™ and ORTHO-CEPT™ (ethinyl estradiol/desogestrel), ORTHO-CYCLEN™ and ORTHO-TRICYCLEN™ (ethinyl estradiol/norgestimate), MICRONOR™ and NOR-QD™ (norethindrone), and OVRETTE™ (norgestrel).

[1996] Additional treatments for endocrine and/or hormone imbalance disorders include, but are not limited to, testosterone esters such as methenolone acetate and testosterone undecanoate; parenteral and oral androgens such as TESTOJECT-50™ (testosterone), TESTEX™ (testosterone propionate), DELATESTRYL™ (testosterone enanthate), DEPO-TESTOSTERONE™ (testosterone cypionate), DANOCRINE™ (danazol), HALOTESTIN™ (fluoxymesterone), ORETON METHYL™, TESTRED™ and VIRILON™ (methyltestosterone), and OXANDRIN™ (oxandrolone); testosterone transdermal systems such as TESTODERM™; androgen receptor antagonist and 5-alpha-reductase inhibitors such as ANDROCUR™ (cyproterone acetate), EULEXIN™ (flutamide), and PROSCAR™ (finasteride); adrenocorticotropic hormone preparations such as CORTROSYN™ (cosyntropin); adrenocortical steroids and their synthetic analogs such as ACLOVATE™ (alclometasone dipropionate), CYCLOCORT™ (amcinonide), BECLOVENT™ and VANCERIL™ (beclomethasone dipropionate), CELESTONE™ (betamethasone), BENISONE™ and UTICORT™ (betamethasone benzoate), DIPROSONE™ (betamethasone dipropionate), CELESTONE PHOSPHATE™ (betamethasone sodium phosphate), CELESTONE SOLUSPAN™ (betamethasone sodium phosphate and acetate), BETA-VAL™ and VALISONE™ (betamethasone valerate), TEMOVATE™ (clobetasol propionate), CLODERM™ (clocortolone pivalate), CORTEF™ and HYDROCORTONE™ (cortisol (hydrocortisone)), HYDROCORTONE ACETATE™ (cortisol (hydrocortisone) acetate), LOCOID™ (cortisol (hydrocortisone) butyrate), HYDROCORTONE PHOSPHATE™ (cortisol (hydrocortisone) sodium phosphate), A-HYDROCORT™ and SOLU CORTEF™ (cortisol (hydrocortisone) sodium succinate), WESTCOR™ (cortisol (hydrocortisone) valerate), CORTISONE ACETATE™ (cortisone acetate), DESOWEN™ and TRIDESILON™ (desonide), TOPICORT™ (desoximetasone), DECADRON™ (dexamethasone), DECADRON LA™ (dexamethasone acetate), DECADRON PHOSPHATE™ and HEXADROL PHOSPHATE™ (dexamethasone sodium phosphate), FLORONE™ and MAXIFLOR™ (diflorasone diacetate), FLORINEF ACETATE™ (fludrocortisone acetate), AEROBID™ and NASALIDE™ (flunisolide), FLUONID™ and SYNALAR™ (fluocinolone acetonide), LIDEX™ (fluocinonide), FLUOR-OP™ and FML™ (fluorometholone), CORDRAN™ (flurandrenolide), HALOG™ (halcinonide), HMS LIZUIFILM™ (medrysone), MEDROL™ (methylprednisolone), DEPO-MEDROL™ and MEDROL ACETATE™ (methylprednisone acetate), A-METHAPRED™ and SOLUMEDROL™ (methylprednisolone sodium succinate), ELOCON™ (mometasone furoate), HALDRONE™ (paramethasone acetate), DELTA-CORTEF™ (prednisolone), ECONOPRED™ (prednisolone acetate), HYDELTRASOL™ (prednisolone sodium phosphate), HYDELTRA-T.B.A™ (prednisolone tebutate), DELTASONE™ (prednisone), ARISTOCORT™ and KENACORT™ (triamcinolone), KENALOG™ (triamcinolone acetonide), ARISTOCORT™ and KENACORT DIACETATE™ (triamcinolone diacetate), and ARISTOSPAN™ (triamcinolone hexacetonide); inhibitors of biosynthesis and action of adrenocortical steroids such as CYTADREN™ (aminoglutethimide), NIZORAL™ (ketoconazole), MODRASTANE™ (trilostane), and METOPIRONE™ (metyrapone); bovine, porcine or human insulin or mixtures thereof; insulin analogs; recombinant human insulin such as HUMULIN™ and NOVOLIN™; oral hypoglycemic agents such as ORAMIDE™ and ORINASE™ (tolbutamide), DIABINESE™ (chlorpropamide), TOLAMIDE™ and TOLINASE™ (tolazamide), DYMELOR™ (acetohexamide), glibenclamide, MICRONASE™, DIBETA™ and GLYNASE™ (glyburide), GLUCOTROL™ (glipizide), and DIAMICRON™ (gliclazide), GLUCOPHAGE™ (metformin), ciglitazone, pioglitazone, and alpha-glucosidase inhibitors; bovine or porcine glucagon; somatostatins such as SANDOSTATIN™ (octreotide); and diazoxides such as PROGLYCEM™ (diazoxide).

[1997] In one embodiment, the Therapeutics of the invention are administered in combination with treatments for uterine motility disorders. Treatments for uterine motility disorders include, but are not limited to, estrogen drugs such as conjugated estrogens (e.g., PREMARIN® and ESTRATAB®), estradiols (e.g., CLIMARA® and ALORA®), estropipate, and chlorotrianisene; progestin drugs (e.g., AMEN® (medroxyprogesterone), MICRONOR® (norethidrone acetate), PROMETRIUM® progesterone, and megestrol acetate); and estrogen/progesterone combination therapies such as, for example, conjugated estrogens/medroxyprogesterone (e.g., PREMPRO™ and PREMPHASE®) and norethindrone acetate/ethinyl estsradiol (e.g., FEMHRT™).

[1998] In an additional embodiment, the Therapeutics of the invention are administered in combination with drugs effective in treating iron deficiency and hypochromic anemias, including but not limited to, ferrous sulfate (iron sulfate, FEOSOL™), ferrous fumarate (e.g., FEOSTAT™), ferrous gluconate (e.g., FERGON™), polysaccharide-iron complex (e.g., NIFEREX™), iron dextran injection (e.g., INFED™), cupric sulfate, pyroxidine, riboflavin, Vitamin B₁₂, cyancobalamin injection (e.g., REDISOL™, RUBRAMIN PC™), hydroxocobalamin, folic acid (e.g., FOLVITE™), leucovorin (folinic acid, 5-CHOH4PteGlu, citrovorum factor) or WELLCOVORIN (Calcium salt of leucovorin), transferrin or ferritin.

[1999] In certain embodiments, the Therapeutics of the invention are administered in combination with agents used to treat psychiatric disorders. Psychiatric drugs that may be administered with the Therapeutics of the invention include, but are not limited to, antipsychotic agents (e.g., chlorpromazine, chlorprothixene, clozapine, fluphenazine, haloperidol, loxapine, mesoridazine, molindone, olanzapine, perphenazine, pimozide, quetiapine, risperidone, thioridazine, thiothixene, trifluoperazine, and triflupromazine), antimanic agents (e.g., carbamazepine, divalproex sodium, lithium carbonate, and lithium citrate), antidepressants (e.g., amitriptyline, amoxapine, bupropion, citalopram, clomipramine, desipramine, doxepin, fluvoxamine, fluoxetine, imipramine, isocarboxazid, maprotiline, mirtazapine, nefazodone, nortriptyline, paroxetine, phenelzine, protriptyline, sertraline, tranylcypromine, trazodone, trimipramine, and venlafaxine), antianxiety agents (e.g., alprazolam, buspirone, chlordiazepoxide, clorazepate, diazepam, halazepam, lorazepam, oxazepam, and prazepam), and stimulants (e.g., d-amphetamine, methylphenidate, and pemoline).

[2000] In other embodiments, the Therapeutics of the invention are administered in combination with agents used to treat neurological disorders. Neurological agents that may be administered with the Therapeutics of the invention include, but are not limited to, antiepileptic agents (e.g., carbamazepine, clonazepam, ethosuximide, phenobarbital, phenyloin, primidone, valproic acid, divalproex sodium, felbamate, gabapentin, lamotrigine, levetiracetam, oxcarbazepine, tiagabine, topiramate, zonisamide, diazepam, lorazepam, and clonazepam), antiparkinsonian agents (e.g., levodopa/carbidopa, selegiline, amantidine, bromocriptine, pergolide, ropinirole, pramipexole, benztropine; biperiden; ethopropazine; procyclidine; trihexyphenidyl, tolcapone), and ALS therapeutics (e.g. riluzole).

[2001] In another embodiment, Therapeutics of the invention are administered in combination with vasodilating agents and/or calcium channel blocking agents. Vasodilating agents that may be administered with the Therapeutics of the invention include, but are not limited to, Angiotensin Converting Enzyme (ACE) inhibitors (e.g., papaverine, isoxsuprine, benazepril, captopril, cilazapril, enalapril, enalaprilat, fosinopril, lisinopril, moexipril, perindopril, quinapril, ramipril, spirapril, trandolapril, and nylidrin), and nitrates (e.g., isosorbide dinitrate, isosorbide mononitrate, and nitroglycerin). Examples of calcium channel blocking agents that may be administered in combination with the Therapeutics of the invention include, but are not limited to amlodipine, bepridil, diltiazem, felodipine, flunarizine, isradipine, nicardipine, nifedipine, nimodipine, and verapamil.

[2002] In certain embodiments, the Therapeutics of the invention are administered in combination with treatments for gastrointestinal disorders. Treatments for gastrointestinal disorders that may be administered with the Therapeutic of the invention include, but are not limited to, H₂ histamine receptor antagonists (e.g., TAGAMET™ (cimetidine), ZANTAC™ (ranitidine), PEPCID™ (famotidine), and AXID™ (nizatidine)); inhibitors of H⁺, K⁺ ATPase (e.g., PREVACID™ (lansoprazole) and PRILOSEC™ (omeprazole)); Bismuth compounds (e.g., PEPTO-BISMOL™ (bismuth subsalicylate) and DE-NOL™ (bismuth subcitrate)); various antacids; sucralfate; prostaglandin analogs (e.g. CYTOTEC™ (misoprostol)); muscarinic cholinergic antagonists; laxatives (e.g., surfactant laxatives, stimulant laxatives, saline and osmotic laxatives); antidiarrheal agents (e.g., LOMOTIL™ (diphenoxylate), MOTOFEN™ (diphenoxin), and IMODIUM™ (loperamide hydrochloride)), synthetic analogs of somatostatin such as SANDOSTATIN™ (octreotide), antiemetic agents (e.g., ZOFRAN™ (ondansetron), KYTRIL™ (granisetron hydrochloride), tropisetron, dolasetron, metoclopramide, chlorpromazine, perphenazine, prochlorperazine, promethazine, thiethylperazine, triflupromazine, domperidone, haloperidol, droperidol, trimethobenzamide, dexamethasone, methylprednisolone, dronabinol, and nabilone); D2 antagonists (e.g., metoclopramide, trimethobenzamide and chlorpromazine); bile salts; chenodeoxycholic acid; ursodeoxycholic acid; and pancreatic enzyme preparations such as pancreatin and pancrelipase.

[2003] In additional embodiments, the Therapeutics of the invention are administered in combination with other therapeutic or prophylactic regimens, such as, for example, radiation therapy.

### Example 14

### Method of Treating Decreased Levels of the Polypeptide

[2004] The present invention relates to a method for treating an individual in need of an increased level of a polypeptide of the invention in the body comprising administering to such an individual a composition comprising a therapeutically effective amount of an agonist of the invention (including polypeptides of the invention). Moreover, it will be appreciated that conditions caused by a decrease in the standard or normal expression level of a polypeptide of the present invention in an individual can be treated by administering the agonist or antagonist of the present invention. Thus, the invention also provides a method of treatment of an individual in need of an increased level of the polypeptide comprising administering to such an individual a Therapeutic comprising an amount of the agonist or antagonist to increase the activity level of the polypeptide in such an individual.

[2005] For example, a patient with decreased levels of a polypeptide receives a daily dose 0.1-100 ug/kg of the agonist or antagonist for six consecutive days. The exact details of the dosing scheme, based on administration and formulation, are provided in Example 13.

### Example 15

### Method of Treating Increased Levels of the Polypeptide

[2006] The present invention also relates to a method of treating an individual in need of a decreased level of a polypeptide of the invention in the body comprising administering to such an individual a composition comprising a therapeutically effective amount of an antagonist of the invention (including polypeptides and antibodies of the invention).

[2007] In one example, antisense technology is used to inhibit production of a polypeptide of the present invention. This technology is one example of a method of decreasing levels of a polypeptide, due to a variety of etiologies, such as cancer.

[2008] For example, a patient diagnosed with abnormally increased levels of a polypeptide is administered intravenously antisense polynucleotides at 0.5, 1.0, 1.5, 2.0 and 3.0 mg/kg day for 21 days. This treatment is repeated after a 7-day rest period if the treatment was well tolerated. The antisense polynucleotides of the present invention can be formulated using techniques and formulations described herein (e.g. see Example 13), or otherwise known in the art.

### Example 16

### Method of Treatment Using Gene Therapy—Ex Vivo

[2009] One method of gene therapy transplants fibroblasts, which are capable of expressing a polypeptide, onto a patient. Generally, fibroblasts are obtained from a subject by skin biopsy. The resulting tissue is placed in tissue-culture medium and separated into small pieces. Small chunks of the tissue are placed on a wet surface of a tissue culture flask, approximately ten pieces are placed in each flask. The flask is turned upside down, closed tight and left at room temperature over night. After 24 hours at room temperature, the flask is inverted and the chunks of tissue remain fixed to the bottom of the flask and fresh media (e.g., Ham's F12 media, with 10% FBS, penicillin and streptomycin) is added. The flasks are then incubated at 37 degree C. for approximately one week.

[2010] At this time, fresh media is added and subsequently changed every several days. After an additional two weeks in culture, a monolayer of fibroblasts emerge. The monolayer is trypsinized and scaled into larger flasks.

[2011] pMV-7 (Kirschmeier, P. T. et al., DNA, 7:219-25 (1988)), flanked by the long terminal repeats of the Moloney murine sarcoma virus, is digested with EcoRI and HindIII and subsequently treated with calf intestinal phosphatase. The linear vector is fractionated on agarose gel and purified, using glass beads.

[2012] The cDNA encoding a polypeptide of the present invention can be amplified using PCR primers which correspond to the 5′ and 3′ end sequences respectively as set forth in Example 1 using primers and having appropriate restriction sites and initiation/stop codons, if necessary. Preferably, the 5′ primer contains an EcoRI site and the 3′ primer includes a HindIII site. Equal quantities of the Moloney murine sarcoma virus linear backbone and the amplified EcoRI and HindIII fragment are added together, in the presence of T4 DNA ligase. The resulting mixture is maintained under conditions appropriate for ligation of the two fragments. The ligation mixture is then used to transform bacteria HB101, which are then plated onto agar containing kanamycin for the purpose of confirming that the vector has the gene of interest properly inserted.

[2013] The amphotropic pA317 or GP+am12 packaging cells are grown in tissue culture to confluent density in Dulbecco's Modified Eagles Medium (DMEM) with 10% calf serum (CS), penicillin and streptomycin. The MSV vector containing the gene is then added to the media and the packaging cells transduced with the vector. The packaging cells now produce infectious viral particles containing the gene (the packaging cells are now referred to as producer cells).

[2014] Fresh media is added to the transduced producer cells, and subsequently, the media is harvested from a 10 cm plate of confluent producer cells. The spent media, containing the infectious viral particles, is filtered through a millipore filter to remove detached producer cells and this media is then used to infect fibroblast cells. Media is removed from a sub-confluent plate of fibroblasts and quickly replaced with the media from the producer cells. This media is removed and replaced with fresh media. If the titer of virus is high, then virtually all fibroblasts will be infected and no selection is required. If the titer is very low, then it is necessary to use a retroviral vector that has a selectable marker, such as neo or his. Once the fibroblasts have been efficiently infected, the fibroblasts are analyzed to determine whether protein is produced.

[2015] The engineered fibroblasts are then transplanted onto the host, either alone or after having been grown to confluence on cytodex 3 microcarrier beads.

### Example 17

### Gene Therapy Using Endogenous Genes Corresponding to Polynucleotides of the Invention

[2016] Another method of gene therapy according to the present invention involves operably associating the endogenous polynucleotide sequence of the invention with a promoter via homologous recombination as described, for example, in U.S. Pat. No. 5,641,670, issued Jun. 24, 1997; International Publication NO: WO 96/29411, published Sep. 26, 1996; International Publication NO: WO 94/12650, published Aug. 4, 1994; Koller et al., Proc. Natl. Acad. Sci. USA, 86:8932-8935 (1989); and Zijlstra et al., Nature, 342:435-438 (1989). This method involves the activation of a gene which is present in the target cells, but which is not expressed in the cells, or is expressed at a lower level than desired.

[2017] Polynucleotide constructs are made which contain a promoter and targeting sequences, which are homologous to the 5′ non-coding sequence of endogenous polynucleotide sequence, flanking the promoter. The targeting sequence will be sufficiently near the 5′ end of the polynucleotide sequence so the promoter will be operably linked to the endogenous sequence upon homologous recombination. The promoter and the targeting sequences can be amplified using PCR. Preferably, the amplified promoter contains distinct restriction enzyme sites on the 5′ and 3′ ends. Preferably, the 3′ end of the first targeting sequence contains the same restriction enzyme site as the 5′ end of the amplified promoter and the 5′ end of the second targeting sequence contains the same restriction site as the 3′ end of the amplified promoter.

[2018] The amplified promoter and the amplified targeting sequences are digested with the appropriate restriction enzymes and subsequently treated with calf intestinal phosphatase. The digested promoter and digested targeting sequences are added together in the presence of T4 DNA ligase. The resulting mixture is maintained under conditions appropriate for ligation of the two fragments. The construct is size fractionated on an agarose gel, then purified by phenol extraction and ethanol precipitation.

[2019] In this Example, the polynucleotide constructs are administered as naked polynucleotides via electroporation. However, the polynucleotide constructs may also be administered with transfection-facilitating agents, such as liposomes, viral sequences, viral particles, precipitating agents, etc. Such methods of delivery are known in the art.

[2020] Once the cells are transfected, homologous recombination will take place which results in the promoter being operably linked to the endogenous polynucleotide sequence. This results in the expression of polynucleotide corresponding to the polynucleotide in the cell. Expression may be detected by immunological staining, or any other method known in the art.

[2021] Fibroblasts are obtained from a subject by skin biopsy. The resulting tissue is placed in DMEM+10% fetal calf serum. Exponentially growing or early stationary phase fibroblasts are trypsinized and rinsed from the plastic surface with nutrient medium. An aliquot of the cell suspension is removed for counting, and the remaining cells are subjected to centrifugation. The supernatant is aspirated and the pellet is resuspended in 5 ml of electroporation buffer (20 mM HEPES pH 7.3, 137 mM NaCl, 5 mM KCl, 0.7 mM Na₂ HPO₄, 6 mM dextrose). The cells are recentrifuged, the supernatant aspirated, and the cells resuspended in electroporation buffer containing 1 mg/ml acetylated bovine serum albumin. The final cell suspension contains approximately 3×10⁶ cells/ml. Electroporation should be performed immediately following resuspension.

[2022] Plasmid DNA is prepared according to standard techniques. For example, to construct a plasmid for targeting to the locus corresponding to the polynucleotide of the invention, plasmid pUC18 (MBI Fermentas, Amherst, N.Y.) is digested with HindIII. The CMV promoter is amplified by PCR with an XbaI site on the 5′ end and a BamHI site on the 3′ end. Two non-coding sequences are amplified via PCR: one non-coding sequence (fragment 1) is amplified with a HindIII site at the 5′ end and an Xba site at the 3′end; the other non-coding sequence (fragment 2) is amplified with a BamHI site at the 5′end and a HindIII site at the 3′end. The CMV promoter and the fragments (1 and 2) are digested with the appropriate enzymes (CMV promoter—XbaI and BamHI; fragment 1—XbaI; fragment 2—BamHI) and ligated together. The resulting ligation product is digested with HindIII, and ligated with the HindIII-digested pUC18 plasmid.

[2023] Plasmid DNA is added to a sterile cuvette with a 0.4 cm electrode gap (Bio-Rad). The final DNA concentration is generally at least 120 μg/ml. 0.5 ml of the cell suspension (containing approximately 1.5×10⁶ cells) is then added to the cuvette, and the cell suspension and DNA solutions are gently mixed. Electroporation is performed with a Gene-Pulser apparatus (Bio-Rad). Capacitance and voltage are set at 960 μF and 250-300 V, respectively. As voltage increases, cell survival decreases, but the percentage of surviving cells that stably incorporate the introduced DNA into their genome increases dramatically. Given these parameters, a pulse time of approximately 14-20 mSec should be observed.

[2024] Electroporated cells are maintained at room temperature for approximately 5 min, and the contents of the cuvette are then gently removed with a sterile transfer pipette. The cells are added directly to 10 ml of prewarmed nutrient media (DMEM with 15% calf serum) in a 10 cm dish and incubated at 37 degree C. The following day, the media is aspirated and replaced with 10 ml of fresh media and incubated for a further 16-24 hours.

[2025] The engineered fibroblasts are then injected into the host, either alone or after having been grown to confluence on cytodex 3 microcarrier beads. The fibroblasts now produce the protein product. The fibroblasts can then be introduced into a patient as described above.

### Example 18

### Method of Treatment Using Gene Therapy—In Vivo

[2026] Another aspect of the present invention is using in vivo gene therapy methods to treat disorders, diseases and conditions. The gene therapy method relates to the introduction of naked nucleic acid (DNA, RNA, and antisense DNA or RNA) sequences into an animal to increase or decrease the expression of the polypeptide. The polynucleotide of the present invention may be operatively linked to (i.e., associated with) a promoter or any other genetic elements necessary for the expression of the polypeptide by the target tissue. Such gene therapy and delivery techniques and methods are known in the art, see, for example, WO90/11092, WO98/11779; U.S. Pat. Nos. 5,693,622, 5,705,151, 5,580,859; Tabata et al., Cardiovasc. Res. 35(3):470-479 (1997); Chao et al., Pharmacol. Res. 35(6):517-522 (1997); Wolff, Neuromuscul. Disord. 7(5):314-318 (1997); Schwartz et al., Gene Ther. 3(5):405-411 (1996); Tsurumi et al., Circulation 94(12):3281-3290 (1996) (incorporated herein by reference).

[2027] The polynucleotide constructs may be delivered by any method that delivers injectable materials to the cells of an animal, such as, injection into the interstitial space of tissues (heart, muscle, skin, lung, liver, intestine and the like). The polynucleotide constructs can be delivered in a pharmaceutically acceptable liquid or aqueous carrier.

[2028] The term “naked” polynucleotide, DNA or RNA, refers to sequences that are free from any delivery vehicle that acts to assist, promote, or facilitate entry into the cell, including viral sequences, viral particles, liposome formulations, lipofectin or precipitating agents and the like. However, the polynucleotides of the present invention may also be delivered in liposome formulations (such as those taught in Felgner P. L. et al. (1995) Ann. NY Acad. Sci. 772:126-139 and Abdallah B. et al. (1995) Biol. Cell 85(1):1-7) which can be prepared by methods well known to those skilled in the art.

[2029] The polynucleotide vector constructs used in the gene therapy method are preferably constructs that will not integrate into the host genome nor will they contain sequences that allow for replication. Any strong promoter known to those skilled in the art can be used for driving the expression of DNA. Unlike other gene therapy techniques, one major advantage of introducing naked nucleic acid sequences into target cells is the transitory nature of the polynucleotide synthesis in the cells. Studies have shown that non-replicating DNA sequences can be introduced into cells to provide production of the desired polypeptide for periods of up to six months.

[2030] The polynucleotide construct can be delivered to the interstitial space of tissues within an animal, including muscle, skin, brain, lung, liver, spleen, bone marrow, thymus, heart, lymph, blood, bone, cartilage, pancreas, kidney, gall bladder, stomach, intestine, testis, ovary, uterus, rectum, nervous system, eye, gland, and connective tissue. Interstitial space of the tissues comprises the intercellular fluid, mucopolysaccharide matrix among the reticular fibers of organ tissues, elastic fibers in the walls of vessels or chambers, collagen fibers of fibrous tissues, or that same matrix within connective tissue ensheathing muscle cells or in the lacunae of bone. It is similarly the space occupied by the plasma of the circulation and the lymph fluid of the lymphatic channels. Delivery to the interstitial space of muscle tissue is preferred for the reasons discussed below. They may be conveniently delivered by injection into the tissues comprising these cells. They are preferably delivered to and expressed in persistent, non-dividing cells which are differentiated, although delivery and expression may be achieved in non-differentiated or less completely differentiated cells, such as, for example, stem cells of blood or skin fibroblasts. In vivo muscle cells are particularly competent in their ability to take up and express polynucleotides.

[2031] For the naked polynucleotide injection, an effective dosage amount of DNA or RNA will be in the range of from about 0.05 g/kg body weight to about 50 mg/kg body weight. Preferably the dosage will be from about 0.005 mg/kg to about 20 mg/kg and more preferably from about 0.05 mg/kg to about 5 mg/kg. Of course, as the artisan of ordinary skill will appreciate, this dosage will vary according to the tissue site of injection. The appropriate and effective dosage of nucleic acid sequence can readily be determined by those of ordinary skill in the art and may depend on the condition being treated and the route of administration. The preferred route of administration is by the parenteral route of injection into the interstitial space of tissues. However, other parenteral routes may also be used, such as, inhalation of an aerosol formulation particularly for delivery to lungs or bronchial tissues, throat or mucous membranes of the nose. In addition, naked polynucleotide constructs can be delivered to arteries during angioplasty by the catheter used in the procedure.

[2032] The dose response effects of injected polynucleotide in muscle in vivo is determined as follows. Suitable template DNA for production of mRNA coding for polypeptide of the present invention is prepared in accordance with a standard recombinant DNA methodology. The template DNA, which may be either circular or linear, is either used as naked DNA or complexed with liposomes. The quadriceps muscles of mice are then injected with various amounts of the template DNA.

[2033] Five to six week old female and male Balb/C mice are anesthetized by intraperitoneal injection with 0.3 ml of 2.5% Avertin. A 1.5 cm incision is made on the anterior thigh, and the quadriceps muscle is directly visualized. The template DNA is injected in 0.1 ml of carrier in a 1 cc syringe through a 27 gauge needle over one minute, approximately 0.5 cm from the distal insertion site of the muscle into the knee and about 0.2 cm deep. A suture is placed over the injection site for future localization, and the skin is closed with stainless steel clips.

[2034] After an appropriate incubation time (e.g., 7 days) muscle extracts are prepared by excising the entire quadriceps. Every fifth 15 um cross-section of the individual quadriceps muscles is histochemically stained for protein expression. A time course for protein expression may be done in a similar fashion except that quadriceps from different mice are harvested at different times. Persistence of DNA in muscle following injection may be determined by Southern blot analysis after preparing total cellular DNA and HIRT supernatants from injected and control mice. The results of the above experimentation in mice can be used to extrapolate proper dosages and other treatment parameters in humans and other animals using naked DNA.

### Example 19

### Transgenic Animals

[2035] The polypeptides of the invention can also be expressed in transgenic animals. Animals of any species, including, but not limited to, mice, rats, rabbits, hamsters, guinea pigs, pigs, micro-pigs, goats, sheep, cows and non-human primates, e.g., baboons, monkeys, and chimpanzees may be used to generate transgenic animals. In a specific embodiment, techniques described herein or otherwise known in the art, are used to express polypeptides of the invention in humans, as part of a gene therapy protocol.

[2036] Any technique known in the art may be used to introduce the transgene (i.e., polynucleotides of the invention) into animals to produce the founder lines of transgenic animals. Such techniques include, but are not limited to, pronuclear microinjection (Paterson et al., Appl. Microbiol. Biotechnol. 40:691-698 (1994); Carver et al., Biotechnology (NY) 11:1263-1270 (1993); Wright et al., Biotechnology (NY) 9:830-834 (1991); and Hoppe et al., U.S. Pat. No. 4,873,191 (1989)); retrovirus mediated gene transfer into germ lines (Van der Putten et al., Proc. Natl. Acad. Sci., USA 82:6148-6152 (1985)), blastocysts or embryos; gene targeting in embryonic stem cells (Thompson et al., Cell 56:313-321 (1989)); electroporation of cells or embryos (Lo, 1983, Mol Cell. Biol. 3:1803-1814 (1983)); introduction of the polynucleotides of the invention using a gene gun (see, e.g., Ulmer et al., Science 259:1745 (1993); introducing nucleic acid constructs into embryonic pleuripotent stem cells and transferring the stem cells back into the blastocyst; and sperm-mediated gene transfer (Lavitrano et al., Cell 57:717-723 (1989); etc. For a review of such techniques, see Gordon, “Transgenic Animals,” Intl. Rev. Cytol. 115:171-229 (1989), which is incorporated by reference herein in its entirety.

[2037] Any technique known in the art may be used to produce transgenic clones containing polynucleotides of the invention, for example, nuclear transfer into enucleated oocytes of nuclei from cultured embryonic, fetal, or adult cells induced to quiescence (Campell et al., Nature 380:64-66 (1996); Wilmut et al., Nature 385:810-813 (1997)).

[2038] The present invention provides for transgenic animals that carry the transgene in all their cells, as well as animals which carry the transgene in some, but not all their cells, i.e., mosaic animals or chimeric. The transgene may be integrated as a single transgene or as multiple copies such as in concatamers, e.g., head-to-head tandems or head-to-tail tandems. The transgene may also be selectively introduced into and activated in a particular cell type by following, for example, the teaching of Lasko et al. (Lasko et al., Proc. Natl. Acad. Sci. USA 89:6232-6236 (1992)). The regulatory sequences required for such a cell-type specific activation will depend upon the particular cell type of interest, and will be apparent to those of skill in the art. When it is desired that the polynucleotide transgene be integrated into the chromosomal site of the endogenous gene, gene targeting is preferred. Briefly, when such a technique is to be utilized, vectors containing some nucleotide sequences homologous to the endogenous gene are designed for the purpose of integrating, via homologous recombination with chromosomal sequences, into and disrupting the function of the nucleotide sequence of the endogenous gene. The transgene may also be selectively introduced into a particular cell type, thus inactivating the endogenous gene in only that cell type, by following, for example, the teaching of Gu et al. (Gu et al., Science 265:103-106 (1994)). The regulatory sequences required for such a cell-type specific inactivation will depend upon the particular cell type of interest, and will be apparent to those of skill in the art.

[2039] Once transgenic animals have been generated, the expression of the recombinant gene may be assayed utilizing standard techniques. Initial screening may be accomplished by Southern blot analysis or PCR techniques to analyze animal tissues to verify that integration of the transgene has taken place. The level of mRNA expression of the transgene in the tissues of the transgenic animals may also be assessed using techniques which include, but are not limited to, Northern blot analysis of tissue samples obtained from the animal, in situ hybridization analysis, and reverse transcriptase-PCR (rt-PCR). Samples of transgenic gene-expressing tissue may also be evaluated immunocytochemically or immunohistochemically using antibodies specific for the transgene product.

[2040] Once the founder animals are produced, they may be bred, inbred, outbred, or crossbred to produce colonies of the particular animal. Examples of such breeding strategies include, but are not limited to: outbreeding of founder animals with more than one integration site in order to establish separate lines; inbreeding of separate lines in order to produce compound transgenics that express the transgene at higher levels because of the effects of additive expression of each transgene; crossing of heterozygous transgenic animals to produce animals homozygous for a given integration site in order to both augment expression and eliminate the need for screening of animals by DNA analysis; crossing of separate homozygous lines to produce compound heterozygous or homozygous lines; and breeding to place the transgene on a distinct background that is appropriate for an experimental model of interest.

[2041] Transgenic animals of the invention have uses which include, but are not limited to, animal model systems useful in elaborating the biological function of polypeptides of the present invention, studying conditions and/or disorders associated with aberrant expression, and in screening for compounds effective in ameliorating such conditions and/or disorders.

### Example 20

### Knock-Out Animals

[2042] Endogenous gene expression can also be reduced by inactivating or “knocking out” the gene and/or its promoter using targeted homologous recombination. (e.g., see Smithies et al., Nature 317:230-234 (1985); Thomas & Capecchi, Cell 51:503-512 (1987); Thompson et al., Cell 5:313-321 (1989); each of which is incorporated by reference herein in its entirety). For example, a mutant, non-functional polynucleotide of the invention (or a completely unrelated DNA sequence) flanked by DNA homologous to the endogenous polynucleotide sequence (either the coding regions or regulatory regions of the gene) can be used, with or without a selectable marker and/or a negative selectable marker, to transfect cells that express polypeptides of the invention in vivo. In another embodiment, techniques known in the art are used to generate knockouts in cells that contain, but do not express the gene of interest. Insertion of the DNA construct, via targeted homologous recombination, results in inactivation of the targeted gene. Such approaches are particularly suited in research and agricultural fields where modifications to embryonic stem cells can be used to generate animal offspring with an inactive targeted gene (e.g., see Thomas & Capecchi 1987 and Thompson 1989, supra). However this approach can be routinely adapted for use in humans provided the recombinant DNA constructs are directly administered or targeted to the required site in vivo using appropriate viral vectors that will be apparent to those of skill in the art.

[2043] In further embodiments of the invention, cells that are genetically engineered to express the polypeptides of the invention, or alternatively, that are genetically engineered not to express the polypeptides of the invention (e.g., knockouts) are administered to a patient in vivo. Such cells may be obtained from the patient (i.e., animal, including human) or an MHC compatible donor and can include, but are not limited to fibroblasts, bone marrow cells, blood cells (e.g., lymphocytes), adipocytes, muscle cells, endothelial cells etc. The cells are genetically engineered in vitro using recombinant DNA techniques to introduce the coding sequence of polypeptides of the invention into the cells, or alternatively, to disrupt the coding sequence and/or endogenous regulatory sequence associated with the polypeptides of the invention, e.g., by transduction (using viral vectors, and preferably vectors that integrate the transgene into the cell genome) or transfection procedures, including, but not limited to, the use of plasmids, cosmids, YACs, naked DNA, electroporation, liposomes, etc. The coding sequence of the polypeptides of the invention can be placed under the control of a strong constitutive or inducible promoter or promoter/enhancer to achieve expression, and preferably secretion, of the polypeptides of the invention. The engineered cells which express and preferably secrete the polypeptides of the invention can be introduced into the patient systemically, e.g., in the circulation, or intraperitoneally.

[2044] Alternatively, the cells can be incorporated into a matrix and implanted in the body, e.g., genetically engineered fibroblasts can be implanted as part of a skin graft; genetically engineered endothelial cells can be implanted as part of a lymphatic or vascular graft. (See, for example, Anderson et al. U.S. Pat. No. 5,399,349; and Mulligan & Wilson, U.S. Pat. No. 5,460,959 each of which is incorporated by reference herein in its entirety).

[2045] When the cells to be administered are non-autologous or non-MHC compatible cells, they can be administered using well known techniques which prevent the development of a host immune response against the introduced cells. For example, the cells may be introduced in an encapsulated form which, while allowing for an exchange of components with the immediate extracellular environment, does not allow the introduced cells to be recognized by the host immune system.

[2046] Transgenic and “knock-out” animals of the invention have uses which include, but are not limited to, animal model systems useful in elaborating the biological function of polypeptides of the present invention, studying conditions and/or disorders associated with aberrant expression, and in screening for compounds effective in ameliorating such conditions and/or disorders.

### Example 21

### Assays Detecting Stimulation or Inhibition of B Cell Proliferation and Differentiation

[2047] Generation of functional humoral immune responses requires both soluble and cognate signaling between B-lineage cells and their microenvironment. Signals may impart a positive stimulus that allows a B-lineage cell to continue its programmed development, or a negative stimulus that instructs the cell to arrest its current developmental pathway. To date, numerous stimulatory and inhibitory signals have been found to influence B cell responsiveness including IL-2, IL-4, IL-5, IL-6, IL-7, IL10, IL-13, IL-14 and IL-15. Interestingly, these signals are by themselves weak effectors but can, in combination with various co-stimulatory proteins, induce activation, proliferation, differentiation, homing, tolerance and death among B cell populations.

[2048] One of the best studied classes of B-cell co-stimulatory proteins is the TNF-superfamily. Within this family CD40, CD27, and CD30 along with their respective ligands CD154, CD70, and CD153 have been found to regulate a variety of immune responses. Assays which allow for the detection and/or observation of the proliferation and differentiation of these B-cell populations and their precursors are valuable tools in determining the effects various proteins may have on these B-cell populations in terms of proliferation and differentiation. Listed below are two assays designed to allow for the detection of the differentiation, proliferation, or inhibition of B-cell populations and their precursors.

[2049] In Vitro Assay—Agonists or antagonists of the invention can be assessed for its ability to induce activation, proliferation, differentiation or inhibition and/or death in B-cell populations and their precursors. The activity of the agonists or antagonists of the invention on purified human tonsillar B cells, measured qualitatively over the dose range from 0.1 to 10,000 ng/mL, is assessed in a standard B-lymphocyte co-stimulation assay in which purified tonsillar B cells are cultured in the presence of either formalin-fixed Staphylococcus aureus Cowan I (SAC) or immobilized anti-human IgM antibody as the priming agent. Second signals such as IL-2 and IL-15 synergize with SAC and IgM crosslinking to elicit B cell proliferation as measured by tritiated-thymidine incorporation. Novel synergizing agents can be readily identified using this assay. The assay involves isolating human tonsillar B cells by magnetic bead (MACS) depletion of CD3-positive cells. The resulting cell population is greater than 95% B cells as assessed by expression of CD45R(B220).

[2050] Various dilutions of each sample are placed into individual wells of a 96-well plate to which are added 10⁵ B-cells suspended in culture medium (RPMI 1640 containing 10% FBS, 5×10⁻⁵M 2ME, 100 U/ml penicillin, 10 ug/ml streptomycin, and 10⁻⁵ dilution of SAC) in a total volume of 150 ul. Proliferation or inhibition is quantitated by a 20 h pulse (1 uCi/well) with 3H-thymidine (6.7 Ci/mM) beginning 72 h post factor addition. The positive and negative controls are IL2 and medium respectively.

[2051] In vivo Assay—BALB/c mice are injected (i.p.) twice per day with buffer only, or 2 mg/Kg of agonists or antagonists of the invention, or truncated forms thereof. Mice receive this treatment for 4 consecutive days, at which time they are sacrificed and various tissues and serum collected for analyses. Comparison of H&E sections from normal spleens and spleens treated with agonists or antagonists of the invention identify the results of the activity of the agonists or antagonists on spleen cells, such as the diffusion of peri-arterial lymphatic sheaths, and/or significant increases in the nucleated cellularity of the red pulp regions, which may indicate the activation of the differentiation and proliferation of B-cell populations. Immunohistochemical studies using a B cell marker, anti-CD45R(B220), are used to determine whether any physiological changes to splenic cells, such as splenic disorganization, are due to increased B-cell representation within loosely defined B-cell zones that infiltrate established T-cell regions.

[2052] Flow cytometric analyses of the spleens from mice treated with agonist or antagonist is used to indicate whether the agonists or antagonists specifically increases the proportion of ThB+, CD45R(B220)dull B cells over that which is observed in control mice.

[2053] Likewise, a predicted consequence of increased mature B-cell representation in vivo is a relative increase in serum Ig titers. Accordingly, serum IgM and IgA levels are compared between buffer and agonists or antagonists-treated mice.

[2054] The studies described in this example tested activity of agonists or antagonists of the invention. However, one skilled in the art could easily modify the exemplified studies to test the activity of polynucleotides or polypeptides of the invention (e.g., gene therapy).

### Example 22

### T Cell Proliferation Assay

[2055] A CD3-induced proliferation assay is performed on PBMCs and is measured by the uptake of ³H-thymidine. The assay is performed as follows. Ninety-six well plates are coated with 100 μl/well of mAb to CD3 (HIT3a, Pharmingen) or isotype-matched control mAb (B33.1) overnight at 4 degrees C. (1 μg/ml in 0.05M bicarbonate buffer, pH 9.5), then washed three times with PBS. PBMC are isolated by F/H gradient centrifugation from human peripheral blood and added to quadruplicate wells (5×10⁴/well) of mAb coated plates in RPMI containing 10% FCS and P/S in the presence of varying concentrations of agonists or antagonists of the invention (total volume 200 ul). Relevant protein buffer and medium alone are controls. After 48 hr. culture at 37 degrees C., plates are spun for 2 min. at 1000 rpm and 100 μl of supernatant is removed and stored −20 degrees C. for measurement of IL-2 (or other cytokines) if effect on proliferation is observed. Wells are supplemented with 100 ul of medium containing 0.5 uCi of ³H-thymidine and cultured at 37 degrees C. for 18-24 hr. Wells are harvested and incorporation of ³H-thymidine used as a measure of proliferation. Anti-CD3 alone is the positive control for proliferation. IL-2 (100 U/ml) is also used as a control which enhances proliferation. Control antibody which does not induce proliferation of T cells is used as the negative control for the effects of agonists or antagonists of the invention.

[2056] The studies described in this example tested activity of agonists or antagonists of the invention. However, one skilled in the art could easily modify the exemplified studies to test the activity of polynucleotides or polypeptides of the invention (e.g., gene therapy).

### Example 23

### Effect of Agonists or Antagonists of the Invention on the Expression of MHC Class II, Costimulatory and Adhesion Molecules and Cell Differentiation of Monocytes and Monocyte-Derived Human Dendritic Cells

[2057] Dendritic cells are generated by the expansion of proliferating precursors found in the peripheral blood: adherent PBMC or elutriated monocytic fractions are cultured for 7-10 days with GM-CSF (50 ng/ml) and IL-4 (20 ng/ml). These dendritic cells have the characteristic phenotype of immature cells (expression of CD1, CD80, CD86, CD40 and MHC class II antigens). Treatment with activating factors, such as TNF-α, causes a rapid change in surface phenotype (increased expression of MHC class I and II, costimulatory and adhesion molecules, downregulation of FCγ RII, upregulation of CD83). These changes correlate with increased antigen-presenting capacity and with functional maturation of the dendritic cells.

[2058] FACS analysis of surface antigens is performed as follows. Cells are treated 1-3 days with increasing concentrations of agonist or antagonist of the invention or LPS (positive control), washed with PBS containing 1% BSA and 0.02 mM sodium azide, and then incubated with 1:20 dilution of appropriate FITC- or PE-labeled monoclonal antibodies for 30 minutes at 4 degrees C. After an additional wash, the labeled cells are analyzed by flow cytometry on a FACScan (Becton Dickinson).

[2059] Effect on the production of cytokines. Cytokines generated by dendritic cells, in particular IL-12, are important in the initiation of T-cell dependent immune responses. IL-12 strongly influences the development of Th1 helper T-cell immune response, and induces cytotoxic T and NK cell function. An ELISA is used to measure the IL-12 release as follows. Dendritic cells (10⁶/ml) are treated with increasing concentrations of agonists or antagonists of the invention for 24 hours. LPS (100 ng/ml) is added to the cell culture as positive control. Supernatants from the cell cultures are then collected and analyzed for IL-12 content using commercial ELISA kit (e.g., R & D Systems (Minneapolis, Minn.)). The standard protocols provided with the kits are used.

[2060] Effect on the expression of MHC Class II, costimulatory and adhesion molecules. Three major families of cell surface antigens can be identified on monocytes: adhesion molecules, molecules involved in antigen presentation, and Fc receptor. Modulation of the expression of MHC class II antigens and other costimulatory molecules, such as B7 and ICAM-1, may result in changes in the antigen presenting capacity of monocytes and ability to induce T cell activation. Increased expression of Fc receptors may correlate with improved monocyte cytotoxic activity, cytokine release and phagocytosis.

[2061] FACS analysis is used to examine the surface antigens as follows. Monocytes are treated 1-5 days with increasing concentrations of agonists or antagonists of the invention or LPS (positive control), washed with PBS containing 1% BSA and 0.02 mM sodium azide, and then incubated with 1:20 dilution of appropriate FITC- or PE-labeled monoclonal antibodies for 30 minutes at 4 degrees C. After an additional wash, the labeled cells are analyzed by flow cytometry on a FACScan (Becton Dickinson).

[2062] Monocyte activation and/or increased survival. Assays for molecules that activate (or alternatively, inactivate) monocytes and/or increase monocyte survival (or alternatively, decrease monocyte survival) are known in the art and may routinely be applied to determine whether a molecule of the invention functions as an inhibitor or activator of monocytes. Agonists or antagonists of the invention can be screened using the three assays described below. For each of these assays, Peripheral blood mononuclear cells (PBMC) are purified from single donor leukopacks (American Red Cross, Baltimore, Md.) by centrifugation through a Histopaque gradient (Sigma). Monocytes are isolated from PBMC by counterflow centrifugal elutriation.

[2063] Monocyte Survival Assay. Human peripheral blood monocytes progressively lose viability when cultured in absence of serum or other stimuli. Their death results from internally regulated processes (apoptosis). Addition to the culture of activating factors, such as TNF-alpha dramatically improves cell survival and prevents DNA fragmentation. Propidium iodide (PI) staining is used to measure apoptosis as follows. Monocytes are cultured for 48 hours in polypropylene tubes in serum-free medium (positive control), in the presence of 100 ng/ml TNF-alpha (negative control), and in the presence of varying concentrations of the compound to be tested. Cells are suspended at a concentration of 2×10⁶/ml in PBS containing PI at a final concentration of 5 μg/ml, and then incubated at room temperature for 5 minutes before FACScan analysis. PI uptake has been demonstrated to correlate with DNA fragmentation in this experimental paradigm.

[2064] Effect on cytokine release. An important function of monocytes/macrophages is their regulatory activity on other cellular populations of the immune system through the release of cytokines after stimulation. An ELISA to measure cytokine release is performed as follows. Human monocytes are incubated at a density of 5×10⁵ cells/ml with increasing concentrations of agonists or antagonists of the invention and under the same conditions, but in the absence of agonists or antagonists. For IL-12 production, the cells are primed overnight with IFN (100 U/ml) in the presence of agonist or antagonist of the invention. LPS (10 ng/ml) is then added. Conditioned media are collected after 24 h and kept frozen until use. Measurement of TNF-alpha, IL-10, MCP-1 and IL-8 is then performed using a commercially available ELISA kit (e.g., R & D Systems (Minneapolis, Minn.)) and applying the standard protocols provided with the kit.

[2065] Oxidative burst. Purified monocytes are plated in 96-w plate at 2-1×10⁵ cell/well. Increasing concentrations of agonists or antagonists of the invention are added to the wells in a total volume of 0.2 ml culture medium (RPMI 1640+10% FCS, glutamine and antibiotics). After 3 days incubation, the plates are centrifuged and the medium is removed from the wells. To the macrophage monolayers, 0.2 ml per well of phenol red solution (140 mM NaCl, 10 mM potassium phosphate buffer pH 7.0, 5.5 mM dextrose, 0.56 mM phenol red and 19 U/ml of HRPO) is added, together with the stimulant (200 nM PMA). The plates are incubated at 37° C. for 2 hours and the reaction is stopped by adding 20 μl 1N NaOH per well. The absorbance is read at 610 nm. To calculate the amount of H₂O₂ produced by the macrophages, a standard curve of a H₂O₂ solution of known molarity is performed for each experiment.

[2066] The studies described in this example tested activity of agonists or antagonists of the invention. However, one skilled in the art could easily modify the exemplified studies to test the activity of polynucleotides or polypeptides of the invention (e.g., gene therapy).

### Example 24

### Biological Effects of Agonists or Antagonists of the Invention

Astrocyte and Neuronal Assays

[2067] Agonists or antagonists of the invention, expressed in Escherichia coli and purified as described above, can be tested for activity in promoting the survival, neurite outgrowth, or phenotypic differentiation of cortical neuronal cells and for inducing the proliferation of glial fibrillary acidic protein immunopositive cells, astrocytes. The selection of cortical cells for the bioassay is based on the prevalent expression of FGF-1 and FGF-2 in cortical structures and on the previously reported enhancement of cortical neuronal survival resulting from FGF-2 treatment. A thymidine incorporation assay, for example, can be used to elucidate an agonist or antagonist of the invention's activity on these cells.

[2068] Moreover, previous reports describing the biological effects of FGF-2 (basic FGF) on cortical or hippocampal neurons in vitro have demonstrated increases in both neuron survival and neurite outgrowth (Walicke et al., “Fibroblast growth factor promotes survival of dissociated hippocampal neurons and enhances neurite extension.” Proc. Natl. Acad. Sci USA 83:3012-3016. (1986), assay herein incorporated by reference in its entirety). However, reports from experiments done on PC-12 cells suggest that these two responses are not necessarily synonymous and may depend on not only which FGF is being tested but also on which receptor(s) are expressed on the target cells. Using the primary cortical neuronal culture paradigm, the ability of an agonist or antagonist of the invention to induce neurite outgrowth can be compared to the response achieved with FGF-2 using, for example, a thymidine incorporation assay.

Fibroblast and Endothelial Cell Assays

[2069] Human lung fibroblasts are obtained from Clonetics (San Diego, Calif.) and maintained in growth media from Clonetics. Dermal microvascular endothelial cells are obtained from Cell Applications (San Diego, Calif.). For proliferation assays, the human lung fibroblasts and dermal microvascular endothelial cells can be cultured at 5,000 cells/well in a 96-well plate for one day in growth medium. The cells are then incubated for one day in 0.1% BSA basal medium. After replacing the medium with fresh 0.1% BSA medium, the cells are incubated with the test proteins for 3 days. Alamar Blue (Alamar Biosciences, Sacramento, Calif.) is added to each well to a final concentration of 10%. The cells are incubated for 4 hr. Cell viability is measured by reading in a CytoFluor fluorescence reader. For the PGE₂ assays, the human lung fibroblasts are cultured at 5,000 cells/well in a 96-well plate for one day. After a medium change to 0.1% BSA basal medium, the cells are incubated with FGF-2 or agonists or antagonists of the invention with or without IL-1 α for 24 hours. The supernatants are collected and assayed for PGE₂ by EIA kit (Cayman, Ann Arbor, Mich.). For the IL-6 assays, the human lung fibroblasts are cultured at 5,000 cells/well in a 96-well plate for one day. After a medium change to 0.1% BSA basal medium, the cells are incubated with FGF-2 or with or without agonists or antagonists of the invention IL-1a for 24 hours. The supernatants are collected and assayed for IL-6 by ELISA kit (Endogen, Cambridge, Mass.).

[2070] Human lung fibroblasts are cultured with FGF-2 or agonists or antagonists of the invention for 3 days in basal medium before the addition of Alamar Blue to assess effects on growth of the fibroblasts. FGF-2 should show a stimulation at 10-2500 ng/ml which can be used to compare stimulation with agonists or antagonists of the invention.

Parkinson Models.

[2071] The loss of motor function in Parkinson's disease is attributed to a deficiency of striatal dopamine resulting from the degeneration of the nigrostriatal dopaminergic projection neurons. An animal model for Parkinson's that has been extensively characterized involves the systemic administration of 1-methyl-4 phenyl 1,2,3,6-tetrahydropyridine (MPTP). In the CNS, MPTP is taken-up by astrocytes and catabolized by monoamine oxidase B to 1-methyl-4-phenyl pyridine (MPP⁺) and released. Subsequently, MPP⁺ is actively accumulated in dopaminergic neurons by the high-affinity reuptake transporter for dopamine. MPP⁺ is then concentrated in mitochondria by the electrochemical gradient and selectively inhibits nicotidamide adenine disphosphate: ubiquinone oxidoreductionase (complex I), thereby interfering with electron transport and eventually generating oxygen radicals.

[2072] It has been demonstrated in tissue culture paradigms that FGF-2 (basic FGF) has trophic activity towards nigral dopaminergic neurons (Ferrari et al., Dev. Biol. 1989). Recently, Dr. Unsicker's group has demonstrated that administering FGF-2 in gel foam implants in the striatum results in the near complete protection of nigral dopaminergic neurons from the toxicity associated with MPTP exposure (Otto and Unsicker, J. Neuroscience, 1990).

[2073] Based on the data with FGF-2, agonists or antagonists of the invention can be evaluated to determine whether it has an action similar to that of FGF-2 in enhancing dopaminergic neuronal survival in vitro and it can also be tested in vivo for protection of dopaminergic neurons in the striatum from the damage associated with MPTP treatment. The potential effect of an agonist or antagonist of the invention is first examined in vitro in a dopaminergic neuronal cell culture paradigm. The cultures are prepared by dissecting the midbrain floor plate from gestation day 14 Wistar rat embryos. The tissue is dissociated with trypsin and seeded at a density of 200,000 cells/cm² on polyorthinine-laminin coated glass coverslips. The cells are maintained in Dulbecco's Modified Eagle's medium and F12 medium containing hormonal supplements (N1). The cultures are fixed with paraformaldehyde after 8 days in vitro and are processed for tyrosine hydroxylase, a specific marker for dopaminergic neurons, immunohistochemical staining. Dissociated cell cultures are prepared from embryonic rats. The culture medium is changed every third day and the factors are also added at that time.

[2074] Since the dopaminergic neurons are isolated from animals at gestation day 14, a developmental time which is past the stage when the dopaminergic precursor cells are proliferating, an increase in the number of tyrosine hydroxylase immunopositive neurons would represent an increase in the number of dopaminergic neurons surviving in vitro. Therefore, if an agonist or antagonist of the invention acts to prolong the survival of dopaminergic neurons, it would suggest that the agonist or antagonist may be involved in Parkinson's Disease.

[2075] The studies described in this example tested activity of agonists or antagonists of the invention. However, one skilled in the art could easily modify the exemplified studies to test the activity of polynucleotides or polypeptides of the invention (e.g., gene therapy).

### Example 25

### The Effect of Agonists or Antagonists of the Invention on the Growth of Vascular Endothelial Cells

[2076] On day 1, human umbilical vein endothelial cells (HUVEC) are seeded at 2-5×10⁴ cells/35 mm dish density in M199 medium containing 4% fetal bovine serum (FBS), 16 units/ml heparin, and 50 units/ml endothelial cell growth supplements (ECGS, Biotechnique, Inc.). On day 2, the medium is replaced with M199 containing 10% FBS, 8 units/ml heparin. An agonist or antagonist of the invention, and positive controls, such as VEGF and basic FGF (bFGF) are added, at varying concentrations. On days 4 and 6, the medium is replaced. On day 8, cell number is determined with a Coulter Counter.

[2077] An increase in the number of HUVEC cells indicates that the compound of the invention may proliferate vascular endothelial cells, while a decrease in the number of HUVEC cells indicates that the compound of the invention inhibits vascular endothelial cells.

[2078] The studies described in this example tested activity of a polypeptide of the invention. However, one skilled in the art could easily modify the exemplified studies to test the activity of polynucleotides (e.g., gene therapy), agonists, and/or antagonists of the invention.

### Example 26

### Rat Corneal Wound Healing Model

[2079] This animal model shows the effect of an agonist or antagonist of the invention on neovascularization. The experimental protocol includes:
[2080] Making a 1-1.5 mm long incision from the center of cornea into the stromal layer.
[2081] Inserting a spatula below the lip of the incision facing the outer corner of the eye.
[2082] Making a pocket (its base is 1-1.5 mm form the edge of the eye).
[2083] Positioning a pellet, containing 50 ng-5 ug of an agonist or antagonist of the invention, within the pocket.

[2084] Treatment with an agonist or antagonist of the invention can also be applied topically to the corneal wounds in a dosage range of 20 mg-500 mg (daily treatment for five days).

[2085] The studies described in this example tested activity of agonists or antagonists of the invention. However, one skilled in the art could easily modify the exemplified studies to test the activity of polynucleotides or polypeptides of the invention (e.g., gene therapy).

### Example 27

### Diabetic Mouse and Glucocorticoid-Impaired Wound Healing Models

Diabetic db+/db+ Mouse Model.

[2086] To demonstrate that an agonist or antagonist of the invention accelerates the healing process, the genetically diabetic mouse model of wound healing is used. The full thickness wound healing model in the db+/db+ mouse is a well characterized, clinically relevant and reproducible model of impaired wound healing. Healing of the diabetic wound is dependent on formation of granulation tissue and re-epithelialization rather than contraction (Gartner, M. H. et al., J. Surg. Res. 52:389 (1992); Greenhalgh, D. G. et al., Am. J. Pathol. 136:1235 (1990)).

[2087] The diabetic animals have many of the characteristic features observed in Type II diabetes mellitus. Homozygous (db+/db+) mice are obese in comparison to their normal heterozygous (db+/+m) littermates. Mutant diabetic (db+/db+) mice have a single autosomal recessive mutation on chromosome 4 (db+) (Coleman et al. Proc. Natl. Acad. Sci. USA 77:283-293 (1982)). Animals show polyphagia, polydipsia and polyuria. Mutant diabetic mice (db+/db+) have elevated blood glucose, increased or normal insulin levels, and suppressed cell-mediated immunity (Mandel et al., J. Immunol. 120:1375 (1978); Debray-Sachs, M. et al., Clin. Exp. Immunol. 51(1):1-7 (1983); Leiter et al., Am. J. of Pathol. 114:46-55 (1985)). Peripheral neuropathy, myocardial complications, and microvascular lesions, basement membrane thickening and glomerular filtration abnormalities have been described in these animals (Norido, F. et al., Exp. Neurol. 83(2):221-232 (1984); Robertson et al., Diabetes 29(1):60-67 (1980); Giacomelli et al., Lab Invest. 40(4):460-473 (1979); Coleman, D. L., Diabetes 31 (Suppl):1-6 (1982)). These homozygous diabetic mice develop hyperglycemia that is resistant to insulin analogous to human type II diabetes (Mandel et al., J. Immunol. 120:1375-1377 (1978)).

[2088] The characteristics observed in these animals suggests that healing in this model may be similar to the healing observed in human diabetes (Greenhalgh, et al., Am. J. of Pathol. 136:1235-1246 (1990)).

[2089] Genetically diabetic female C57BL/KsJ (db+/db+) mice and their non-diabetic (db+/+m) heterozygous littermates are used in this study (Jackson Laboratories). The animals are purchased at 6 weeks of age and are 8 weeks old at the beginning of the study. Animals are individually housed and received food and water ad libitum. All manipulations are performed using aseptic techniques. The experiments are conducted according to the rules and guidelines of Human Genome Sciences, Inc. Institutional Animal Care and Use Committee and the Guidelines for the Care and Use of Laboratory Animals.

[2090] Wounding protocol is performed according to previously reported methods (Tsuboi, R. and Rifkin, D. B., J. Exp. Med. 172:245-251 (1990)). Briefly, on the day of wounding, animals are anesthetized with an intraperitoneal injection of Avertin (0.01 mg/mL), 2,2,2-tribromoethanol and 2-methyl-2-butanol dissolved in deionized water. The dorsal region of the animal is shaved and the skin washed with 70% ethanol solution and iodine. The surgical area is dried with sterile gauze prior to wounding. An 8 mm full-thickness wound is then created using a Keyes tissue punch. Immediately following wounding, the surrounding skin is gently stretched to eliminate wound expansion. The wounds are left open for the duration of the experiment. Application of the treatment is given topically for 5 consecutive days commencing on the day of wounding. Prior to treatment, wounds are gently cleansed with sterile saline and gauze sponges.

[2091] Wounds are visually examined and photographed at a fixed distance at the day of surgery and at two day intervals thereafter. Wound closure is determined by daily measurement on days 1-5 and on day 8. Wounds are measured horizontally and vertically using a calibrated Jameson caliper. Wounds are considered healed if granulation tissue is no longer visible and the wound is covered by a continuous epithelium.

[2092] An agonist or antagonist of the invention is administered using at a range different doses, from 4 mg to 500 mg per wound per day for 8 days in vehicle. Vehicle control groups received 50 mL of vehicle solution.

[2093] Animals are euthanized on day 8 with an intraperitoneal injection of sodium pentobarbital (300 mg/kg). The wounds and surrounding skin are then harvested for histology and immunohistochemistry. Tissue specimens are placed in 10% neutral buffered formalin in tissue cassettes between biopsy sponges for further processing.

[2094] Three groups of 10 animals each (5 diabetic and 5 non-diabetic controls) are evaluated: 1) Vehicle placebo control, 2) untreated group, and 3) treated group.

[2095] Wound closure is analyzed by measuring the area in the vertical and horizontal axis and obtaining the total square area of the wound. Contraction is then estimated by establishing the differences between the initial wound area (day 0) and that of post treatment (day 8). The wound area on day 1 is 64 mm², the corresponding size of the dermal punch. Calculations are made using the following formula:
[Open area on day 8]−[Open area on day 1]/[Open area on day 1]

[2096] Specimens are fixed in 10% buffered formalin and paraffin embedded blocks are sectioned perpendicular to the wound surface (5 mm) and cut using a Reichert-Jung microtome. Routine hematoxylin-eosin (H&E) staining is performed on cross-sections of bisected wounds. Histologic examination of the wounds are used to assess whether the healing process and the morphologic appearance of the repaired skin is altered by treatment with an agonist or antagonist of the invention. This assessment included verification of the presence of cell accumulation, inflammatory cells, capillaries, fibroblasts, re-epithelialization and epidermal maturity (Greenhalgh, D. G. et al., Am. J. Pathol. 136:1235 (1990)). A calibrated lens micrometer is used by a blinded observer.

[2097] Tissue sections are also stained immunohistochemically with a polyclonal rabbit anti-human keratin antibody using ABC Elite detection system. Human skin is used as a positive tissue control while non-immune IgG is used as a negative control. Keratinocyte growth is determined by evaluating the extent of reepithelialization of the wound using a calibrated lens micrometer.

[2098] Proliferating cell nuclear antigen/cyclin (PCNA) in skin specimens is demonstrated by using anti-PCNA antibody (1:50) with an ABC Elite detection system. Human colon cancer served as a positive tissue control and human brain tissue is used as a negative tissue control. Each specimen included a section with omission of the primary antibody and substitution with non-immune mouse IgG. Ranking of these sections is based on the extent of proliferation on a scale of 0-8, the lower side of the scale reflecting slight proliferation to the higher side reflecting intense proliferation.

[2099] Experimental data are analyzed using an unpaired t test. A p value of <0.05 is considered significant.

Steroid Impaired Rat Model

[2100] The inhibition of wound healing by steroids has been well documented in various in vitro and in vivo systems (Wahl, Glucocorticoids and Wound healing. In: Anti-Inflammatory Steroid Action: Basic and Clinical Aspects. 280-302 (1989); Wahl et al., J. Immunol. 115: 476-481 (1975); Werb et al., J. Exp. Med. 147:1684-1694 (1978)). Glucocorticoids retard wound healing by inhibiting angiogenesis, decreasing vascular permeability (Ebert et al., An. Intern. Med. 37:701-705 (1952)), fibroblast proliferation, and collagen synthesis (Beck et al., Growth Factors. 5: 295-304 (1991); Haynes et al., J. Clin. Invest. 61: 703-797 (1978)) and producing a transient reduction of circulating monocytes (Haynes et al., J. Clin. Invest. 61: 703-797 (1978); Wahl, “Glucocorticoids and wound healing”, In: Antiinflammatory Steroid Action: Basic and Clinical Aspects, Academic Press, New York, pp. 280-302 (1989)). The systemic administration of steroids to impaired wound healing is a well establish phenomenon in rats (Beck et al., Growth Factors. 5: 295-304 (1991); Haynes et al., J. Clin. Invest. 61: 703-797 (1978); Wahl, “Glucocorticoids and wound healing”, In: Antiinflammatory Steroid Action: Basic and Clinical Aspects, Academic Press, New York, pp. 280-302 (1989); Pierce et al., Proc. Natl. Acad. Sci. USA 86: 2229-2233 (1989)).

[2101] To demonstrate that an agonist or antagonist of the invention can accelerate the healing process, the effects of multiple topical applications of the agonist or antagonist on full thickness excisional skin wounds in rats in which healing has been impaired by the systemic administration of methylprednisolone is assessed.

[2102] Young adult male Sprague Dawley rats weighing 250-300 g (Charles River Laboratories) are used in this example. The animals are purchased at 8 weeks of age and are 9 weeks old at the beginning of the study. The healing response of rats is impaired by the systemic administration of methylprednisolone (17 mg/kg/rat intramuscularly) at the time of wounding. Animals are individually housed and received food and water ad libitum. All manipulations are performed using aseptic techniques. This study is conducted according to the rules and guidelines of Human Genome Sciences, Inc. Institutional Animal Care and Use Committee and the Guidelines for the Care and Use of Laboratory Animals.

[2103] The wounding protocol is followed according to section A, above. On the day of wounding, animals are anesthetized with an intramuscular injection of ketamine (50 mg/kg) and xylazine (5 mg/kg). The dorsal region of the animal is shaved and the skin washed with 70% ethanol and iodine solutions. The surgical area is dried with sterile gauze prior to wounding. An 8 mm full-thickness wound is created using a Keyes tissue punch. The wounds are left open for the duration of the experiment. Applications of the testing materials are given topically once a day for 7 consecutive days commencing on the day of wounding and subsequent to methylprednisolone administration. Prior to treatment, wounds are gently cleansed with sterile saline and gauze sponges.

[2104] Wounds are visually examined and photographed at a fixed distance at the day of wounding and at the end of treatment. Wound closure is determined by daily measurement on days 1-5 and on day 8. Wounds are measured horizontally and vertically using a calibrated Jameson caliper. Wounds are considered healed if granulation tissue is no longer visible and the wound is covered by a continuous epithelium.

[2105] The agonist or antagonist of the invention is administered using at a range different doses, from 4 mg to 500 mg per wound per day for 8 days in vehicle. Vehicle control groups received 50 mL of vehicle solution.

[2106] Animals are euthanized on day 8 with an intraperitoneal injection of sodium pentobarbital (300 mg/kg). The wounds and surrounding skin are then harvested for histology. Tissue specimens are placed in 10% neutral buffered formalin in tissue cassettes between biopsy sponges for further processing.

[2107] Three groups of 10 animals each (5 with methylprednisolone and 5 without glucocorticoid) are evaluated: 1) Untreated group 2) Vehicle placebo control 3) treated groups.

[2108] Wound closure is analyzed by measuring the area in the vertical and horizontal axis and obtaining the total area of the wound. Closure is then estimated by establishing the differences between the initial wound area (day 0) and that of post treatment (day 8). The wound area on day 1 is 64 mm², the corresponding size of the dermal punch. Calculations are made using the following formula:
[Open area on day 8]−[Open area on day 1]/[Open area on day 1]

[2109] Specimens are fixed in 10% buffered formalin and paraffin embedded blocks are sectioned perpendicular to the wound surface (5 mm) and cut using an Olympus microtome. Routine hematoxylin-eosin (H&E) staining is performed on cross-sections of bisected wounds. Histologic examination of the wounds allows assessment of whether the healing process and the morphologic appearance of the repaired skin is improved by treatment with an agonist or antagonist of the invention. A calibrated lens micrometer is used by a blinded observer to determine the distance of the wound gap.

[2110] Experimental data are analyzed using an unpaired t test. A p value of <0.05 is considered significant.

[2111] The studies described in this example tested activity of agonists or antagonists of the invention. However, one skilled in the art could easily modify the exemplified studies to test the activity of polynucleotides or polypeptides of the invention (e.g., gene therapy).

### Example 28

### Lymphadema Animal Model

[2112] The purpose of this experimental approach is to create an appropriate and consistent lymphedema model for testing the therapeutic effects of an agonist or antagonist of the invention in lymphangiogenesis and re-establishment of the lymphatic circulatory system in the rat hind limb. Effectiveness is measured by swelling volume of the affected limb, quantification of the amount of lymphatic vasculature, total blood plasma protein, and histopathology. Acute lymphedema is observed for 7-10 days. Perhaps more importantly, the chronic progress of the edema is followed for up to 3-4 weeks.

[2113] Prior to beginning surgery, blood sample is drawn for protein concentration analysis. Male rats weighing approximately ˜350 g are dosed with Pentobarbital. Subsequently, the right legs are shaved from knee to hip. The shaved area is swabbed with gauze soaked in 70% EtOH. Blood is drawn for serum total protein testing. Circumference and volumetric measurements are made prior to injecting dye into paws after marking 2 measurement levels (0.5 cm above heel, at mid-pt of dorsal paw). The intradermal dorsum of both right and left paws are injected with 0.05 ml of 1% Evan's Blue. Circumference and volumetric measurements are then made following injection of dye into paws.

[2114] Using the knee joint as a landmark, a mid-leg inguinal incision is made circumferentially allowing the femoral vessels to be located. Forceps and hemostats are used to dissect and separate the skin flaps. After locating the femoral vessels, the lymphatic vessel that runs along side and underneath the vessel(s) is located. The main lymphatic vessels in this area are then electrically coagulated or suture ligated.

[2115] Using a microscope, muscles in back of the leg (near the semitendinosis and adductors) are bluntly dissected. The popliteal lymph node is then located. The 2 proximal and 2 distal lymphatic vessels and distal blood supply of the popliteal node are then ligated by suturing. The popliteal lymph node, and any accompanying adipose tissue, is then removed by cutting connective tissues.

[2116] Care is taken to control any mild bleeding resulting from this procedure. After lymphatics are occluded, the skin flaps are sealed by using liquid skin (Vetbond) (AJ Buck). The separated skin edges are sealed to the underlying muscle tissue while leaving a gap of ˜0.5 cm around the leg. Skin also may be anchored by suturing to underlying muscle when necessary.

[2117] To avoid infection, animals are housed individually with mesh (no bedding). Recovering animals are checked daily through the optimal edematous peak, which typically occurred by day 5-7. The plateau edematous peak are then observed. To evaluate the intensity of the lymphedema, the circumference and volumes of 2 designated places on each paw before operation and daily for 7 days are measured. The effect of plasma proteins on lymphedema is determined and whether protein analysis is a useful testing perimeter is also investigated. The weights of both control and edematous limbs are evaluated at 2 places. Analysis is performed in a blind manner.

[2118] Circumference Measurements: Under brief gas anesthetic to prevent limb movement, a cloth tape is used to measure limb circumference. Measurements are done at the ankle bone and dorsal paw by 2 different people and those 2 readings are averaged. Readings are taken from both control and edematous limbs.

[2119] Volumetric Measurements: On the day of surgery, animals are anesthetized with Pentobarbital and are tested prior to surgery. For daily volumetrics animals are under brief halothane anesthetic (rapid immobilization and quick recovery), and both legs are shaved and equally marked using waterproof marker on legs. Legs are first dipped in water, then dipped into instrument to each marked level then measured by Buxco edema software (Chen/Victor). Data is recorded by one person, while the other is dipping the limb to marked area.

[2120] Blood-plasma protein measurements: Blood is drawn, spun, and serum separated prior to surgery and then at conclusion for total protein and Ca2⁺ comparison.

[2121] Limb Weight Comparison: After drawing blood, the animal is prepared for tissue collection. The limbs are amputated using a quillitine, then both experimental and control legs are cut at the ligature and weighed. A second weighing is done as the tibio-cacaneal joint is disarticulated and the foot is weighed.

[2122] Histological Preparations: The transverse muscle located behind the knee (popliteal) area is dissected and arranged in a metal mold, filled with freezeGel, dipped into cold methylbutane, placed into labeled sample bags at −80EC until sectioning. Upon sectioning, the muscle is observed under fluorescent microscopy for lymphatics.

[2123] The studies described in this example tested activity of agonists or antagonists of the invention. However, one skilled in the art could easily modify the exemplified studies to test the activity of polynucleotides or polypeptides of the invention (e.g., gene therapy).

### Example 29

### Suppression of TNF Alpha-Induced Adhesion Molecule Expression by an Agonist or Antagonist of the Invention

[2124] The recruitment of lymphocytes to areas of inflammation and angiogenesis involves specific receptor-ligand interactions between cell surface adhesion molecules (CAMs) on lymphocytes and the vascular endothelium. The adhesion process, in both normal and pathological settings, follows a multi-step cascade that involves intercellular adhesion molecule-1 (ICAM-1), vascular cell adhesion molecule-1 (VCAM-1), and endothelial leukocyte adhesion molecule-1 (E-selectin) expression on endothelial cells (EC). The expression of these molecules and others on the vascular endothelium determines the efficiency with which leukocytes may adhere to the local vasculature and extravasate into the local tissue during the development of an inflammatory response. The local concentration of cytokines and growth factor participate in the modulation of the expression of these CAMs.

[2125] Tumor necrosis factor alpha (TNF-a), a potent proinflammatory cytokine, is a stimulator of all three CAMs on endothelial cells and may be involved in a wide variety of inflammatory responses, often resulting in a pathological outcome.

[2126] The potential of an agonist or antagonist of the invention to mediate a suppression of TNF-a induced CAM expression can be examined. A modified ELISA assay which uses ECs as a solid phase absorbent is employed to measure the amount of CAM expression on TNF-a treated ECs when co-stimulated with a member of the FGF family of proteins.

[2127] To perform the experiment, human umbilical vein endothelial cell (HUVEC) cultures are obtained from pooled cord harvests and maintained in growth medium (EGM-2; Clonetics, San Diego, Calif.) supplemented with 10% FCS and 1% penicillin/streptomycin in a 37 degree C. humidified incubator containing 5% CO₂. HUVECs are seeded in 96-well plates at concentrations of 1×10⁴ cells/well in EGM medium at 37 degree C. for 18-24 hrs or until confluent. The monolayers are subsequently washed 3 times with a serum-free solution of RPMI-1640 supplemented with 100 U/ml penicillin and 100 mg/ml streptomycin, and treated with a given cytokine and/or growth factor(s) for 24 h at 37 degree C. Following incubation, the cells are then evaluated for CAM expression.

[2128] Human Umbilical Vein Endothelial cells (HUVECs) are grown in a standard 96 well plate to confluence. Growth medium is removed from the cells and replaced with 90 ul of 199 Medium (10% FBS). Samples for testing and positive or negative controls are added to the plate in triplicate (in 10 ul volumes). Plates are incubated at 37 degree C. for either 5 h (selectin and integrin expression) or 24 h (integrin expression only). Plates are aspirated to remove medium and 100 μl of 0.1% paraformaldehyde-PBS (with Ca++ and Mg++) is added to each well. Plates are held at 4° C. for 30 min.

[2129] Fixative is then removed from the wells and wells are washed 1× with PBS(+Ca,Mg)+0.5% BSA and drained. Do not allow the wells to dry. Add 10 μl of diluted primary antibody to the test and control wells. Anti-ICAM-1-Biotin, Anti-VCAM-1-Biotin and Anti-E-selectin-Biotin are used at a concentration of 10 μg/ml (1:10 dilution of 0.1 mg/ml stock antibody). Cells are incubated at 37° C. for 30 min. in a humidified environment. Wells are washed X3 with PBS(+Ca,Mg)+0.5% BSA.

[2130] Then add 20 μl of diluted ExtrAvidin-Alkaline Phosphotase (1:5,000 dilution) to each well and incubated at 37° C. for 30 min. Wells are washed ×3 with PBS(+Ca,Mg)+0.5% BSA. 1 tablet of p-Nitrophenol Phosphate pNPP is dissolved in 5 ml of glycine buffer (pH 10.4). 100 μl of pNPP substrate in glycine buffer is added to each test well. Standard wells in triplicate are prepared from the working dilution of the ExtrAvidin-Alkaline Phosphotase in glycine buffer: 1:5,000 (10⁰)>10^{-0.5}>10⁻¹>10^{-1.5}. 5 μl of each dilution is added to triplicate wells and the resulting AP content in each well is 5.50 ng, 1.74 ng, 0.55 ng, 0.18 ng. 100 μl of pNNP reagent must then be added to each of the standard wells. The plate must be incubated at 37° C. for 4 h. A volume of 50 μl of 3M NaOH is added to all wells. The results are quantified on a plate reader at 405 nm. The background subtraction option is used on blank wells filled with glycine buffer only. The template is set up to indicate the concentration of AP-conjugate in each standard well [5.50 ng; 1.74 ng; 0.55 ng; 0.18 ng]. Results are indicated as amount of bound AP-conjugate in each sample.

[2131] The studies described in this example tested activity of agonists or antagonists of the invention. However, one skilled in the art could easily modify the exemplified studies to test the activity of polynucleotides or polypeptides of the invention (e.g., gene therapy).

### Example 30

### Production Of Polypeptide of the Invention for High-Throughput Screening Assays

[2132] The following protocol produces a supernatant containing polypeptide of the present invention to be tested. This supernatant can then be used in the Screening Assays described in Examples 32-41.

[2133] First, dilute Poly-D-Lysine (644 587 Boehringer-Mannheim) stock solution (1 mg/ml in PBS) 1:20 in PBS (w/o calcium or magnesium 17-516F Biowhittaker) for a working solution of 50 ug/ml. Add 200 ul of this solution to each well (24 well plates) and incubate at RT for 20 minutes. Be sure to distribute the solution over each well (note: a 12-channel pipetter may be used with tips on every other channel). Aspirate off the Poly-D-Lysine solution and rinse with 1 ml PBS (Phosphate Buffered Saline). The PBS should remain in the well until just prior to plating the cells and plates may be poly-lysine coated in advance for up to two weeks.

[2134] Plate 293T cells (do not carry cells past P+20) at 2×10⁵ cells/well in 0.5 ml DMEM (Dulbecco's Modified Eagle Medium) (with 4.5 G/L glucose and L-glutamine (12-604F Biowhittaker))/10% heat inactivated FBS (14-503F Biowhittaker)/1×Penstrep (17-602E Biowhittaker). Let the cells grow overnight.

[2135] The next day, mix together in a sterile solution basin: 300 ul Lipofectamine (18324-012 Gibco/BRL) and 5 ml Optimem 1 (31985070 Gibco/BRL)/96-well plate. With a small volume multi-channel pipetter, aliquot approximately 2 ug of an expression vector containing a polynucleotide insert, produced by the methods described in Examples 8-10, into an appropriately labeled 96-well round bottom plate. With a multi-channel pipetter, add 50 ul of the Lipofectamine/Optimem I mixture to each well. Pipette up and down gently to mix. Incubate at RT 15-45 minutes. After about 20 minutes, use a multi-channel pipetter to add 150 ul Optimem I to each well. As a control, one plate of vector DNA lacking an insert should be transfected with each set of transfections.

[2136] Preferably, the transfection should be performed by tag-teaming the following tasks. By tag-teaming, hands on time is cut in half, and the cells do not spend too much time on PBS. First, person A aspirates off the media from four 24-well plates of cells, and then person B rinses each well with 0.5-1 ml PBS. Person A then aspirates off PBS rinse, and person B, using a 12-channel pipetter with tips on every other channel, adds the 200 ul of DNA/Lipofectamine/Optimem I complex to the odd wells first, then to the even wells, to each row on the 24-well plates. Incubate at 37 degree C. for 6 hours.

[2137] While cells are incubating, prepare appropriate media, either 1% BSA in DMEM with 1×penstrep, or HGS CHO-5 media (116.6 mg/L of CaCl2 (anhyd); 0.00130 mg/L CuSO₄-5H₂O; 0.050 mg/L of Fe(NO₃)₃-9H₂O; 0.417 mg/L of FeSO₄-7H₂O; 311.80 mg/L of Kcl; 28.64 mg/L of MgCl₂; 48.84 mg/L of MgSO₄; 6995.50 mg/L of NaCl; 2400.0 mg/L of NaHCO₃; 62.50 mg/L of NaH₂PO₄—H₂O; 71.02 mg/L of Na₂HPO4; 0.4320 mg/L of ZnSO₄-7H₂O; 0.002 mg/L of Arachidonic Acid; 1.022 mg/L of Cholesterol; 0.070 mg/L of DL-alpha-Tocopherol-Acetate; 0.0520 mg/L of Linoleic Acid; 0.010 mg/L of Linolenic Acid; 0.010 mg/L of Myristic Acid; 0.010 mg/L of Oleic Acid; 0.010 mg/L of Palmitric Acid; 0.010 mg/L of Palmitic Acid; 100 mg/L of Pluronic F-68; 0.010 mg/L of Stearic Acid; 2.20 mg/L of Tween 80; 4551 mg/L of D-Glucose; 130.85 mg/ml of L-Alanine; 147.50 mg/ml of L-Arginine-HCL; 7.50 mg/ml of L-Asparagine-H₂O; 6.65 mg/ml of L-Aspartic Acid; 29.56 mg/ml of L-Cystine-2HCL-H₂O; 31.29 mg/ml of L-Cystine-2HCL; 7.35 mg/ml of L-Glutamic Acid; 365.0 mg/ml of L-Glutamine; 18.75 mg/ml of Glycine; 52.48 mg/ml of L-Histidine-HCL-H₂O; 106.97 mg/ml of L-Isoleucine; 111.45 mg/ml of L-Leucine; 163.75 mg/ml of L-Lysine HCL; 32.34 mg/ml of L-Methionine; 68.48 mg/ml of L-Phenylalainine; 40.0 mg/ml of L-Proline; 26.25 mg/ml of L-Serine; 101.05 mg/ml of L-Threonine; 19.22 mg/ml of L-Tryptophan; 91.79 mg/ml of L-Tryrosine-2Na-2H₂O; and 99.65 mg/ml of L-Valine; 0.0035 mg/L of Biotin; 3.24 mg/L of D-Ca Pantothenate; 11.78 mg/L of Choline Chloride; 4.65 mg/L of Folic Acid; 15.60 mg/L of i-Inositol; 3.02 mg/L of Niacinamide; 3.00 mg/L of Pyridoxal HCL; 0.031 mg/L of Pyridoxine HCL; 0.319 mg/L of Riboflavin; 3.17 mg/L of Thiamine HCL; 0.365 mg/L of Thymidine; 0.680 mg/L of Vitamin B₁₂; 25 mM of HEPES Buffer; 2.39 mg/L of Na Hypoxanthine; 0.105 mg/L of Lipoic Acid; 0.081 mg/L of Sodium Putrescine-2HCL; 55.0 mg/L of Sodium Pyruvate; 0.0067 mg/L of Sodium Selenite; 20 uM of Ethanolamine; 0.122 mg/L of Ferric Citrate; 41.70 mg/L of Methyl-B-Cyclodextrin complexed with Linoleic Acid; 33.33 mg/L of Methyl-B-Cyclodextrin complexed with Oleic Acid; 10 mg/L of Methyl-B-Cyclodextrin complexed with Retinal Acetate. Adjust osmolarity to 327 mOsm) with 2 mm glutamine and 1×penstrep. (BSA (81-068-3 Bayer) 100 gm dissolved in 1L DMEM for a 10% BSA stock solution). Filter the media and collect 50 ul for endotoxin assay in 15 ml polystyrene conical.

[2138] The transfection reaction is terminated, preferably by tag-teaming, at the end of the incubation period. Person A aspirates off the transfection media, while person B adds 1.5 ml appropriate media to each well. Incubate at 37 degree C. for 45 or 72 hours depending on the media used: 1% BSA for 45 hours or CHO-5 for 72 hours.

[2139] On day four, using a 300 ul multichannel pipetter, aliquot 600 ul in one 1 ml deep well plate and the remaining supernatant into a 2 ml deep well. The supernatants from each well can then be used in the assays described in Examples 32-39.

[2140] It is specifically understood that when activity is obtained in any of the assays described below using a supernatant, the activity originates from either the polypeptide of the present invention directly (e.g., as a secreted protein) or by polypeptide of the present invention inducing expression of other proteins, which are then secreted into the supernatant. Thus, the invention further provides a method of identifying the protein in the supernatant characterized by an activity in a particular assay.

### Example 31

### Construction of GAS Reporter Construct

[2141] One signal transduction pathway involved in the differentiation and proliferation of cells is called the Jaks-STATs pathway. Activated proteins in the Jaks-STATs pathway bind to gamma activation site “GAS” elements or interferon-sensitive responsive element (“ISRE”), located in the promoter of many genes. The binding of a protein to these elements alter the expression of the associated gene.

[2142] GAS and ISRE elements are recognized by a class of transcription factors called Signal Transducers and Activators of Transcription, or “STATs.” There are six members of the STATs family. Stat1 and Stat3 are present in many cell types, as is Stat2 (as response to IFN-alpha is widespread). Stat4 is more restricted and is not in many cell types though it has been found in T helper class I, cells after treatment with IL-12. Stat5 was originally called mammary growth factor, but has been found at higher concentrations in other cells including myeloid cells. It can be activated in tissue culture cells by many cytokines.

[2143] The STATs are activated to translocate from the cytoplasm to the nucleus upon tyrosine phosphorylation by a set of kinases known as the Janus Kinase (“Jaks”) family. Jaks represent a distinct family of soluble tyrosine kinases and include Tyk2, Jak1, Jak2, and Jak3. These kinases display significant sequence similarity and are generally catalytically inactive in resting cells.

[2144] The Jaks are activated by a wide range of receptors summarized in the Table below. (Adapted from review by Schidler and Darnell, Ann. Rev. Biochem. 64:621-51 (1995)). A cytokine receptor family, capable of activating Jaks, is divided into two groups: (a) Class 1 includes receptors for IL-2, IL-3, IL-4, IL-6, IL-7, IL-9, IL-11, IL-12, IL-15, Epo, PRL, GH, G-CSF, GM-CSF, LIF, CNTF, and thrombopoietin; and (b) Class 2 includes IFN-a, IFN-g, and IL-10. The Class 1 receptors share a conserved cysteine motif (a set of four conserved cysteines and one tryptophan) and a WSXWS motif (a membrane proximal region encoding Trp-Ser-Xaa-Trp-Ser (SEQ ID NO: 2)).

[2145] Thus, on binding of a ligand to a receptor, Jaks are activated, which in turn activate STATs, which then translocate and bind to GAS elements. This entire process is encompassed in the Jaks-STATs signal transduction pathway. Therefore, activation of the Jaks-STATs pathway, reflected by the binding of the GAS or the ISRE element, can be used to indicate proteins involved in the proliferation and differentiation of cells. For example, growth factors and cytokines are known to activate the Jaks-STATs pathway (See Table below). Thus, by using GAS elements linked to reporter molecules, activators of the Jaks-STATs pathway can be identified.

| | JAKs | | | | | |
|---|---|---|---|---|---|---|
| Ligand | tyk2 | Jak1 | Jak2 | Jak3 | STATS | GAS(elements) or ISRE |

IFN family

| | | | | | | |
|---|---|---|---|---|---|---|
| IFN-a/B | + | + | − | − | 1,2,3 | ISRE |
| IFN-g | | + | + | − | 1 | GAS (IRF1 > Lys6 > IFP) |
| Il-10 | + | ? | ? | − | 1,3 | |
| gp130 family | | | | | | |
| IL-6 (Pleiotropic) | + | + | + | ? | 1,3 | GAS (IRF1 > Lys6 > IFP) |
| Il-11 (Pleiotropic) | ? | + | ? | ? | 1,3 | |
| OnM(Pleiotropic) | ? | + | + | ? | 1,3 | |
| LIF(Pleiotropic) | ? | + | + | ? | 1,3 | |
| CNTF(Pleiotropic) | −/+ | + | + | ? | 1,3 | |
| G-CSF(Pleiotropic) | ? | + | ? | ? | 1,3 | |
| IL-12(Pleiotropic) | + | − | + | + | 1,3 | |
| g-C family | | | | | | |
| IL-2 (lymphocytes) | − | + | − | + | 1,3,5 | GAS |
| IL-4 (lymph/myeloid) | − | + | − | + | 6 | GAS (IRF1 = IFP > > Ly6)(IgH) |
| IL-7 (lymphocytes) | − | + | − | + | 5 | GAS |
| IL-9 (lymphocytes) | − | + | − | + | 5 | GAS |
| IL-13 (lymphocyte) | − | + | ? | ? | 6 | GAS |
| IL-15 | ? | + | ? | + | 5 | GAS |
| gp140 family | | | | | | |
| IL-3 (myeloid) | − | − | + | − | 5 | GAS (IRF1 > IFP > > Ly6) |
| IL-5 (myeloid) | − | − | + | − | 5 | GAS |
| GM-CSF (myeloid) | − | − | + | − | 5 | GAS |
| Growth hormone family | | | | | | |
| GH | ? | − | + | − | 5 | |
| PRL | ? | +/− | + | − | 1,3,5 | |
| EPO | ? | − | + | − | 5 | GAS (B − CAS > IRF1 = IFP > > Ly6) |
| Receptor Tyrosine Kinases | | | | | | |
| EGF | ? | + | + | − | 1,3 | GAS (IRF1) |
| PDGF | ? | + | + | − | 1,3 | |
| CSF-1 | ? | + | + | − | 1,3 | GAS (not IRF1) |

[2146] To construct a synthetic GAS containing promoter element, which is used in the Biological Assays described in Examples 32-33, a PCR based strategy is employed to generate a GAS-SV40 promoter sequence. The 5′ primer contains four tandem copies of the GAS binding site found in the IRF1 promoter and previously demonstrated to bind STATs upon induction with a range of cytokines (Rothman et al., Immunity 1:457-468 (1994).), although other GAS or ISRE elements can be used instead. The 5′ primer also contains 18 bp of sequence complementary to the SV40 early promoter sequence and is flanked with an XhoI site. The sequence of the 5′ primer is:

| (SEQ ID NO:3) | |
|---|---|
| | 5′:GCGCCTCGAGATTTCCCCGAAATCTAGATTTCCCCGAAATGATTTCCCCGAA |
| | ATGATTTCCCCGAAATATCTGCCATCTCAATTAG:3′ |

[2147] The downstream primer is complementary to the SV40 promoter and is flanked with a Hind III site: 5′:GCGGCAAGCTTTTTGCAAAGCCTAGGC:3′ (SEQ ID NO: 4)

[2148] PCR amplification is performed using the SV40 promoter template present in the B-gal:promoter plasmid obtained from Clontech. The resulting PCR fragment is digested with XhoI/Hind III and subcloned into BLSK2−. (Stratagene.) Sequencing with forward and reverse primers confirms that the insert contains the following sequence:

| (SEQ ID NO:5) | |
|---|---|
| | 5′:CTCGAGATTTCCCCGAAATCTAGATTTCCCCGAAATGATTTCCCCGAAATGA |
| | TTTCCCCGAAATATCTGCCATCTCAATTAGTCAGCAACCATAGTCCCGCCCCTA |
| | ACTCCGCCCATCCCGCCCCTAACTCCGCCCAGTTCCGCCCATTCTCCGCCCCAT |
| | GGCTGACTAATTTTTTTTATTTATGCAGAGGCCGAGGCCGCCTCGGCCTCTGAG |
| | CTATTCCAGAAGTAGTGAGGAGGCTTTTTTGGAGGCCTAGGCTTTTGCAAAAA |
| | GCTT:3′ |

[2149] With this GAS promoter element linked to the SV40 promoter, a GAS:SEAP2 reporter construct is next engineered. Here, the reporter molecule is a secreted alkaline phosphatase, or “SEAP.” Clearly, however, any reporter molecule can be instead of SEAP, in this or in any of the other Examples. Well known reporter molecules that can be used instead of SEAP include chloramphenicol acetyltransferase (CAT), luciferase, alkaline phosphatase, B-galactosidase, green fluorescent protein (GFP), or any protein detectable by an antibody.

[2150] The above sequence confirmed synthetic GAS-SV40 promoter element is subcloned into the pSEAP-Promoter vector obtained from Clontech using HindIII and XhoI, effectively replacing the SV40 promoter with the amplified GAS:SV40 promoter element, to create the GAS-SEAP vector. However, this vector does not contain a neomycin resistance gene, and therefore, is not preferred for mammalian expression systems.

[2151] Thus, in order to generate mammalian stable cell lines expressing the GAS-SEAP reporter, the GAS-SEAP cassette is removed from the GAS-SEAP vector using SalI and NotI, and inserted into a backbone vector containing the neomycin resistance gene, such as pGFP-1 (Clontech), using these restriction sites in the multiple cloning site, to create the GAS-SEAP/Neo vector. Once this vector is transfected into mammalian cells, this vector can then be used as a reporter molecule for GAS binding as described in Examples 32-33.

[2152] Other constructs can be made using the above description and replacing GAS with a different promoter sequence. For example, construction of reporter molecules containing EGR and NF-KB promoter sequences are described in Examples 34 and 35. However, many other promoters can be substituted using the protocols described in these Examples. For instance, SRE, IL-2, NFAT, or Osteocalcin promoters can be substituted, alone or in combination (e.g., GAS/NF-KB/EGR, GAS/NF-KB, Il-2/NFAT, or NF-KB/GAS). Similarly, other cell lines can be used to test reporter construct activity, such as HELA (epithelial), HUVEC (endothelial), Reh (B-cell), Saos-2 (osteoblast), HUVAC (aortic), or Cardiomyocyte.

### Example 32

### High-Throughput Screening Assay for T-Cell Activity

[2153] The following protocol is used to assess T-cell activity by identifying factors, and determining whether supernate containing a polypeptide of the invention proliferates and/or differentiates T-cells. T-cell activity is assessed using the GAS/SEAP/Neo construct produced in Example 31. Thus, factors that increase SEAP activity indicate the ability to activate the Jaks-STATS signal transduction pathway. The T-cell used in this assay is Jurkat T-cells (ATCC Accession No. TIB-152), although Molt-3 cells (ATCC Accession No. CRL-1552) and Molt-4 cells (ATCC Accession No. CRL-1582) cells can also be used.

[2154] Jurkat T-cells are lymphoblastic CD4+ Th1 helper cells. In order to generate stable cell lines, approximately 2 million Jurkat cells are transfected with the GAS-SEAP/neo vector using DMRIE-C (Life Technologies) (transfection procedure described below). The transfected cells are seeded to a density of approximately 20,000 cells per well and transfectants resistant to 1 mg/ml genticin selected. Resistant colonies are expanded and then tested for their response to increasing concentrations of interferon gamma. The dose response of a selected clone is demonstrated.

[2155] Specifically, the following protocol will yield sufficient cells for 75 wells containing 200 ul of cells. Thus, it is either scaled up, or performed in multiple to generate sufficient cells for multiple 96 well plates. Jurkat cells are maintained in RPMI+10% serum with 1% Pen-Strep. Combine 2.5 mls of OPTI-MEM (Life Technologies) with 10 ug of plasmid DNA in a T25 flask. Add 2.5 ml OPTI-MEM containing 50 ul of DMRIE-C and incubate at room temperature for 15-45 mins.

[2156] During the incubation period, count cell concentration, spin down the required number of cells (10⁷ per transfection), and resuspend in OPTI-MEM to a final concentration of 10⁷ cells/ml. Then add 1 ml of 1×10⁷ cells in OPTI-MEM to T25 flask and incubate at 37 degree C. for 6 hrs. After the incubation, add 10 ml of RPMI+15% serum.

[2157] The Jurkat:GAS-SEAP stable reporter lines are maintained in RPMI+10% serum, 1 mg/ml Genticin, and 1% Pen-Strep. These cells are treated with supernatants containing polypeptide of the present invention or polypeptide of the present invention induced polypeptides as produced by the protocol described in Example 30.

[2158] On the day of treatment with the supernatant, the cells should be washed and resuspended in fresh RPMI+10% serum to a density of 500,000 cells per ml. The exact number of cells required will depend on the number of supernatants being screened. For one 96 well plate, approximately 10 million cells (for 10 plates, 100 million cells) are required.

[2159] Transfer the cells to a triangular reservoir boat, in order to dispense the cells into a 96 well dish, using a 12 channel pipette. Using a 12 channel pipette, transfer 200 ul of cells into each well (therefore adding 100,000 cells per well).

[2160] After all the plates have been seeded, 50 ul of the supernatants are transferred directly from the 96 well plate containing the supernatants into each well using a 12 channel pipette. In addition, a dose of exogenous interferon gamma (0.1, 1.0, 10 ng) is added to wells H9, H10, and H11 to serve as additional positive controls for the assay.

[2161] The 96 well dishes containing Jurkat cells treated with supernatants are placed in an incubator for 48 hrs (note: this time is variable between 48-72 hrs). 35 ul samples from each well are then transferred to an opaque 96 well plate using a 12 channel pipette. The opaque plates should be covered (using sellophene covers) and stored at −20 degree C. until SEAP assays are performed according to Example 36. The plates containing the remaining treated cells are placed at 4 degree C. and serve as a source of material for repeating the assay on a specific well if desired.

[2162] As a positive control, 100 Unit/ml interferon gamma can be used which is known to activate Jurkat T cells. Over 30 fold induction is typically observed in the positive control wells.

[2163] The above protocol may be used in the generation of both transient, as well as, stable transfected cells, which would be apparent to those of skill in the art.

### Example 33

### High-Throughput Screening Assay Identifying Myeloid Activity

[2164] The following protocol is used to assess myeloid activity of polypeptide of the present invention by determining whether polypeptide of the present invention proliferates and/or differentiates myeloid cells. Myeloid cell activity is assessed using the GAS/SEAP/Neo construct produced in Example 31. Thus, factors that increase SEAP activity indicate the ability to activate the Jaks-STATS signal transduction pathway. The myeloid cell used in this assay is U937, a pre-monocyte cell line, although TF-1, HL60, or KG1 can be used.

[2165] To transiently transfect U937 cells with the GAS/SEAP/Neo construct produced in Example 31, a DEAE-Dextran method (Kharbanda et al., 1994, Cell Growth & Differentiation, 5:259-265) is used. First, harvest 2×10⁷ U937 cells and wash with PBS. The U937 cells are usually grown in RPMI 1640 medium containing 10% heat-inactivated fetal bovine serum (FBS) supplemented with 100 units/ml penicillin and 100 mg/ml streptomycin.

[2166] Next, suspend the cells in 1 ml of 20 mM Tris-HCl (pH 7.4) buffer containing 0.5 mg/ml DEAE-Dextran, 8 ug GAS-SEAP2 plasmid DNA, 140 mM NaCl, 5 mM KCl, 375 uM Na₂HPO₄.7H₂O, 1 mM MgCl₂, and 675 uM CaCl₂. Incubate at 37 degrees C. for 45 mm.

[2167] Wash the cells with RPMI 1640 medium containing 10% FBS and then resuspend in 10 ml complete medium and incubate at 37 degree C. for 36 hr.

[2168] The GAS-SEAP/U937 stable cells are obtained by growing the cells in 400 ug/ml G418. The G418-free medium is used for routine growth but every one to two months, the cells should be re-grown in 400 ug/ml G418 for couple of passages.

[2169] These cells are tested by harvesting 1×10⁸ cells (this is enough for ten 96-well plates assay) and wash with PBS. Suspend the cells in 200 ml above described growth medium, with a final density of 5×10⁵ cells/ml. Plate 200 ul cells per well in the 96-well plate (or 1×10⁵ cells/well).

[2170] Add 50 ul of the supernatant prepared by the protocol described in Example 30. Incubate at 37 degee C. for 48 to 72 hr. As a positive control, 100 Unit/ml interferon gamma can be used which is known to activate U937 cells. Over 30 fold induction is typically observed in the positive control wells. SEAP assay the supernatant according to the protocol described in Example 36.

### Example 34

### High-Throughput Screening Assay Identifying Neuronal Activity

[2171] When cells undergo differentiation and proliferation, a group of genes are activated through many different signal transduction pathways. One of these genes, EGR1 (early growth response gene 1), is induced in various tissues and cell types upon activation. The promoter of EGR1 is responsible for such induction. Using the EGR1 promoter linked to reporter molecules, activation of cells can be assessed by polypeptide of the present invention.

[2172] Particularly, the following protocol is used to assess neuronal activity in PC12 cell lines. PC12 cells (rat phenochromocytoma cells) are known to proliferate and/or differentiate by activation with a number of mitogens, such as TPA (tetradecanoyl phorbol acetate), NGF (nerve growth factor), and EGF (epidermal growth factor). The EGR1 gene expression is activated during this treatment. Thus, by stably transfecting PC12 cells with a construct containing an EGR promoter linked to SEAP reporter, activation of PC12 cells by polypeptide of the present invention can be assessed.

[2173] The EGR/SEAP reporter construct can be assembled by the following protocol. The EGR-1 promoter sequence (−633 to +1) (Sakamoto K et al., Oncogene 6:867-871 (1991)) can be PCR amplified from human genomic DNA using the following primers:

(SEQ ID NO:6)

5′ GCGCTCGAGGGATGACAGCGATAGAACCCCGG-3′

(SEQ ID NO:7)

5′ GCGAAGCTTCGCGACTCCCCGGATCCGCCTC-3′

[2174] Using the GAS:SEAP/Neo vector produced in Example 31, EGR1 amplified product can then be inserted into this vector. Linearize the GAS:SEAP/Neo vector using restriction enzymes XhoI/HindIII, removing the GAS/SV40 stuffer. Restrict the EGR1 amplified product with these same enzymes. Ligate the vector and the EGR1 promoter.

[2175] To prepare 96 well-plates for cell culture, two mls of a coating solution (1:30 dilution of collagen type I (Upstate Biotech Inc. Cat#08-115) in 30% ethanol (filter sterilized)) is added per one 10 cm plate or 50 ml per well of the 96-well plate, and allowed to air dry for 2 hr.

[2176] PC12 cells are routinely grown in RPMI-1640 medium (Bio Whittaker) containing 10% horse serum (JRH BIOSCIENCES, Cat. # 12449-78P), 5% heat-inactivated fetal bovine serum (FBS) supplemented with 100 units/ml penicillin and 100 ug/ml streptomycin on a precoated 10 cm tissue culture dish. One to four split is done every three to four days. Cells are removed from the plates by scraping and resuspended with pipetting up and down for more than 15 times.

[2177] Transfect the EGR/SEAP/Neo construct into PC12 using the Lipofectamine protocol described in Example 30. EGR-SEAP/PC12 stable cells are obtained by growing the cells in 300 ug/ml G418. The G418-free medium is used for routine growth but every one to two months, the cells should be re-grown in 300 ug/ml G418 for couple of passages.

[2178] To assay for neuronal activity, a 10 cm plate with cells around 70 to 80% confluent is screened by removing the old medium. Wash the cells once with PBS (Phosphate buffered saline). Then starve the cells in low serum medium (RPMI-1640 containing 1% horse serum and 0.5% FBS with antibiotics) overnight.

[2179] The next morning, remove the medium and wash the cells with PBS. Scrape off the cells from the plate, suspend the cells well in 2 ml low serum medium. Count the cell number and add more low serum medium to reach final cell density as 5×10⁵ cells/ml.

[2180] Add 200 ul of the cell suspension to each well of 96-well plate (equivalent to 1×10⁵ cells/well). Add 50 ul supernatant produced by Example 30, 37 degree C. for 48 to 72 hr. As a positive control, a growth factor known to activate PC12 cells through EGR can be used, such as 50 ng/ul of Neuronal Growth Factor (NGF). Over fifty-fold induction of SEAP is typically seen in the positive control wells. SEAP assay the supernatant according to Example 36.

### Example 35

### High-Throughput Screening Assay for T-Cell Activity

[2181] NF-KB (Nuclear Factor KB) is a transcription factor activated by a wide variety of agents including the inflammatory cytokines IL-1 and TNF, CD30 and CD40, lymphotoxin-alpha and lymphotoxin-beta, by exposure to LPS or thrombin, and by expression of certain viral gene products. As a transcription factor, NF-KB regulates the expression of genes involved in immune cell activation, control of apoptosis (NF-KB appears to shield cells from apoptosis), B and T-cell development, anti-viral and antimicrobial responses, and multiple stress responses.

[2182] In non-stimulated conditions, NF-KB is retained in the cytoplasm with I-KB (Inhibitor KB). However, upon stimulation, I-KB is phosphorylated and degraded, causing NF-KB to shuttle to the nucleus, thereby activating transcription of target genes. Target genes activated by NF-KB include IL-2, IL-6, GM-CSF, ICAM-1 and class 1 MHC.

[2183] Due to its central role and ability to respond to a range of stimuli, reporter constructs utilizing the NF-KB promoter element are used to screen the supernatants produced in Example 30. Activators or inhibitors of NF-KB would be useful in treating, preventing, and/or diagnosing diseases. For example, inhibitors of NF-KB could be used to treat those diseases related to the acute or chronic activation of NF-KB, such as rheumatoid arthritis.

[2184] To construct a vector containing the NF-KB promoter element, a PCR based strategy is employed. The upstream primer contains four tandem copies of the NF-KB binding site (GGGGACTTTCCC) (SEQ ID NO: 8), 18 bp of sequence complementary to the 5′ end of the SV40 early promoter sequence, and is flanked with an XhoI site:

| (SEQ ID NO:9) | |
|---|---|
| | 5′:GCGGCCTCGAGGGGACTTTCCCGGGGACTTTCCGGGGACTTTCCGGGACTTT |
| | CCATCCTGCCATCTCAATTAG:3′ |

[2185] The downstream primer is complementary to the 3′ end of the SV40 promoter and is flanked with a Hind III site:

| | |
|---|---|
| 5′:GCGGCAAGCTTTTTGCAAAGCCTAGGC:3′ | (SEQ ID NO:4) |

[2186] PCR amplification is performed using the SV40 promoter template present in the pB-gal:promoter plasmid obtained from Clontech. The resulting PCR fragment is digested with XhoI and Hind III and subcloned into BLSK2−. (Stratagene) Sequencing with the T7 and T3 primers confirms the insert contains the following sequence:

| (SEQ ID NO:10) | |
|---|---|
| | 5′:CTCGAGGGGACTTTCCCGGGGACTTTCCGGGGACTTTCCGGGACTTTCCATC |
| | TGCCATCTCAATTAGTCAGCAACCATAGTCCCGCCCCTAACTCCGCCCATCCC |
| | GCCCCTAACTCCGCCCAGTTCCGCCCATTCTCCGCCCCATGGCTGACTAATTTT |
| | TTTTATTTATGCAGAGGCCGAGGCCGCCTCGGCCTCTGAGCTATTCCAGAAGT |
| | AGTGAGGAGGCTTTTTTGGAGGCCTAGGCTTTTGCAAAAAGCTT:3′ |

[2187] Next, replace the SV40 minimal promoter element present in the pSEAP2-promoter plasmid (Clontech) with this NF-KB/SV40 fragment using XhoI and HindIII. However, this vector does not contain a neomycin resistance gene, and therefore, is not preferred for mammalian expression systems.

[2188] In order to generate stable mammalian cell lines, the NF-KB/SV40/SEAP cassette is removed from the above NF-KB/SEAP vector using restriction enzymes SalI and NotI, and inserted into a vector containing neomycin resistance. Particularly, the NF-KB/SV40/SEAP cassette was inserted into pGFP-1 (Clontech), replacing the GFP gene, after restricting pGFP-1 with SalI and NotI.

[2189] Once NF-KB/SV40/SEAP/Neo vector is created, stable Jurkat T-cells are created and maintained according to the protocol described in Example 32. Similarly, the method for assaying supernatants with these stable Jurkat T-cells is also described in Example 32. As a positive control, exogenous TNF alpha (0.1, 1, 10 ng) is added to wells H9, H10, and H11, with a 5-10 fold activation typically observed.

### Example 36

### Assay for SEAP Activity

[2190] As a reporter molecule for the assays described in Examples 32-35, SEAP activity is assayed using the Tropix Phospho-light Kit (Cat. BP-400) according to the following general procedure. The Tropix Phospho-light Kit supplies the Dilution, Assay, and Reaction Buffers used below.

[2191] Prime a dispenser with the 2.5× Dilution Buffer and dispense 15 ul of 2.5× dilution buffer into Optiplates containing 35 ul of a supernatant. Seal the plates with a plastic sealer and incubate at 65 degree C. for 30 min. Separate the Optiplates to avoid uneven heating.

[2192] Cool the samples to room temperature for 15 minutes. Empty the dispenser and prime with the Assay Buffer. Add 50 ml Assay Buffer and incubate at room temperature 5 min. Empty the dispenser and prime with the Reaction Buffer (see the Table below). Add 50 ul Reaction Buffer and incubate at room temperature for 20 minutes. Since the intensity of the chemiluminescent signal is time dependent, and it takes about 10 minutes to read 5 plates on a luminometer, thus one should treat 5 plates at each time and start the second set 10 minutes later.

[2193] Read the relative light unit in the luminometer. Set H12 as blank, and print the results. An increase in chemiluminescence indicates reporter activity.

[2194] Reaction Buffer Formulation:

| # of plates | Rxn buffer diluent (ml) | CSPD (ml) |
|---|---|---|
| 10 | 60 | 3 |
| 11 | 65 | 3.25 |
| 12 | 70 | 3.5 |
| 13 | 75 | 3.75 |
| 14 | 80 | 4 |
| 15 | 85 | 4.25 |
| 16 | 90 | 4.5 |
| 17 | 95 | 4.75 |
| 18 | 100 | 5 |
| 19 | 105 | 5.25 |
| 20 | 110 | 5.5 |
| 21 | 115 | 5.75 |
| 22 | 120 | 6 |
| 23 | 125 | 6.25 |
| 24 | 130 | 6.5 |
| 25 | 135 | 6.75 |
| 26 | 140 | 7 |
| 27 | 145 | 7.25 |
| 28 | 150 | 7.5 |
| 29 | 155 | 7.75 |
| 30 | 160 | 8 |
| 31 | 165 | 8.25 |
| 32 | 170 | 8.5 |
| 33 | 175 | 8.75 |
| 34 | 180 | 9 |
| 35 | 185 | 9.25 |
| 36 | 190 | 9.5 |
| 37 | 195 | 9.75 |
| 38 | 200 | 10 |
| 39 | 205 | 10.25 |
| 40 | 210 | 10.5 |
| 41 | 215 | 10.75 |
| 42 | 220 | 11 |
| 43 | 225 | 11.25 |
| 44 | 230 | 11.5 |
| 45 | 235 | 11.75 |
| 46 | 240 | 12 |
| 47 | 245 | 12.25 |
| 48 | 250 | 12.5 |
| 49 | 255 | 12.75 |
| 50 | 260 | 13 |

### Example 37

### High-Throughput Screening Assay Identifying Changes in Small Molecule Concentration and Membrane Permeability

[2195] Binding of a ligand to a receptor is known to alter intracellular levels of small molecules, such as calcium, potassium, sodium, and pH, as well as alter membrane potential. These alterations can be measured in an assay to identify supernatants which bind to receptors of a particular cell. Although the following protocol describes an assay for calcium, this protocol can easily be modified to detect changes in potassium, sodium, pH, membrane potential, or any other small molecule which is detectable by a fluorescent probe.

[2196] The following assay uses Fluorometric Imaging Plate Reader (“FLIPR”) to measure changes in fluorescent molecules (Molecular Probes) that bind small molecules. Clearly, any fluorescent molecule detecting a small molecule can be used instead of the calcium fluorescent molecule, fluo-4 (Molecular Probes, Inc.; catalog no. F-14202), used here.

[2197] For adherent cells, seed the cells at 10,000-20,000 cells/well in a Co-star black 96-well plate with clear bottom. The plate is incubated in a CO₂ incubator for 20 hours. The adherent cells are washed two times in Biotek washer with 200 ul of HBSS (Hank's Balanced Salt Solution) leaving 100 ul of buffer after the final wash.

[2198] A stock solution of 1 mg/ml fluo-4 is made in 10% pluronic acid DMSO. To load the cells with fluo-4, 50 ul of 12 ug/ml fluo-4 is added to each well. The plate is incubated at 37 degrees C. in a CO₂ incubator for 60 min. The plate is washed four times in the Biotek washer with HBSS leaving 100 ul of buffer.

[2199] For non-adherent cells, the cells are spun down from culture media. Cells are resuspended to 2-5×10⁶ cells/ml with HBSS in a 50-ml conical tube. 4 ul of 1 mg/ml fluo-4 solution in 10% pluronic acid DMSO is added to each ml of cell suspension. The tube is then placed in a 37 degrees C. water bath for 30-60 min. The cells are washed twice with HBSS, resuspended to 1×10⁶ cells/ml, and dispensed into a microplate, 100 ul/well. The plate is centrifuged at 1000 rpm for 5 min. The plate is then washed once in Denley Cell Wash with 200 ul, followed by an aspiration step to 100 ul final volume.

[2200] For a non-cell based assay, each well contains a fluorescent molecule, such as fluo-4. The supernatant is added to the well, and a change in fluorescence is detected.

[2201] To measure the fluorescence of intracellular calcium, the FLIPR is set for the following parameters: (1) System gain is 300-800 mW; (2) Exposure time is 0.4 second; (3) Camera F/stop is F/2; (4) Excitation is 488 nm; (5) Emission is 530 nm; and (6) Sample addition is 50 ul. Increased emission at 530 nm indicates an extracellular signaling event caused by the a molecule, either polypeptide of the present invention or a molecule induced by polypeptide of the present invention, which has resulted in an increase in the intracellular Ca⁺⁺ concentration.

### Example 38

### High-Throughput Screening Assay Identifying Tyrosine Kinase Activity

[2202] The Protein Tyrosine Kinases (PTK) represent a diverse group of transmembrane and cytoplasmic kinases. Within the Receptor Protein Tyrosine Kinase RPTK) group are receptors for a range of mitogenic and metabolic growth factors including the PDGF, FGF, EGF, NGF, HGF and Insulin receptor subfamilies. In addition there are a large family of RPTKs for which the corresponding ligand is unknown. Ligands for RPTKs include mainly secreted small proteins, but also membrane-bound and extracellular matrix proteins.

[2203] Activation of RPTK by ligands involves ligand-mediated receptor dimerization, resulting in transphosphorylation of the receptor subunits and activation of the cytoplasmic tyrosine kinases. The cytoplasmic tyrosine kinases include receptor associated tyrosine kinases of the src-family (e.g., src, yes, lck, lyn, fyn) and non-receptor linked and cytosolic protein tyrosine kinases, such as the Jak family, members of which mediate signal transduction triggered by the cytokine superfamily of receptors (e.g., the Interleukins, Interferons, GM-CSF, and Leptin).

[2204] Because of the wide range of known factors capable of stimulating tyrosine kinase activity, identifying whether polypeptide of the present invention or a molecule induced by polypeptide of the present invention is capable of activating tyrosine kinase signal transduction pathways is of interest. Therefore, the following protocol is designed to identify such molecules capable of activating the tyrosine kinase signal transduction pathways.

[2205] Seed target cells (e.g., primary keratinocytes) at a density of approximately 25,000 cells per well in a 96 well Loprodyne Silent Screen Plates purchased from Nalge Nunc (Naperville, Ill.). The plates are sterilized with two 30 minute rinses with 100% ethanol, rinsed with water and dried overnight. Some plates are coated for 2 hr with 100 ml of cell culture grade type I collagen (50 mg/ml), gelatin (2%) or polylysine (50 mg/ml), all of which can be purchased from Sigma Chemicals (St. Louis, Mo.) or 10% Matrigel purchased from Becton Dickinson (Bedford, Mass.), or calf serum, rinsed with PBS and stored at 4 degree C. Cell growth on these plates is assayed by seeding 5,000 cells/well in growth medium and indirect quantitation of cell number through use of alamar Blue as described by the manufacturer Alamar Biosciences, Inc. (Sacramento, Calif.) after 48 hr. Falcon plate covers #3071 from Becton Dickinson (Bedford, Mass.) are used to cover the Loprodyne Silent Screen Plates. Falcon Microtest III cell culture plates can also be used in some proliferation experiments.

[2206] To prepare extracts, A431 cells are seeded onto the nylon membranes of Loprodyne plates (20,000/200 ml/well) and cultured overnight in complete medium. Cells are quiesced by incubation in serum-free basal medium for 24 hr. After 5-20 minutes treatment with EGF (60 ng/ml) or 50 ul of the supernatant produced in Example 30, the medium was removed and 100 ml of extraction buffer ((20 mM HEPES pH 7.5, 0.15 M NaCl, 1% Triton X-100, 0.1% SDS, 2 mM Na3VO4, 2 mM Na4P2O7 and a cocktail of protease inhibitors (# 1836170) obtained from Boeheringer Mannheim (Indianapolis, Ind.)) is added to each well and the plate is shaken on a rotating shaker for 5 minutes at 4° C. The plate is then placed in a vacuum transfer manifold and the extract filtered through the 0.45 mm membrane bottoms of each well using house vacuum. Extracts are collected in a 96-well catch/assay plate in the bottom of the vacuum manifold and immediately placed on ice. To obtain extracts clarified by centrifugation, the content of each well, after detergent solubilization for 5 minutes, is removed and centrifuged for 15 minutes at 4 degree C. at 16,000×g.

[2207] Test the filtered extracts for levels of tyrosine kinase activity. Although many methods of detecting tyrosine kinase activity are known, one method is described here.

[2208] Generally, the tyrosine kinase activity of a supernatant is evaluated by determining its ability to phosphorylate a tyrosine residue on a specific substrate (a biotinylated peptide). Biotinylated peptides that can be used for this purpose include PSK1 (corresponding to amino acids 6-20 of the cell division kinase cdc2-p34) and PSK2 (corresponding to amino acids 1-17 of gastrin). Both peptides are substrates for a range of tyrosine kinases and are available from Boehringer Mannheim.

[2209] The tyrosine kinase reaction is set up by adding the following components in order. First, add 10 ul of 5 uM Biotinylated Peptide, then 10 ul ATP/Mg₂₊ (5 mM ATP/50 mM MgCl₂), then 10 ul of 5× Assay Buffer (40 mM imidazole hydrochloride, pH7.3, 40 mM beta-glycerophosphate, 1 mM EGTA, 100 mM MgCl₂, 5 mM MnCl₂, 0.5 mg/ml BSA), then 5 ul of Sodium Vanadate (1 mM), and then 5 ul of water. Mix the components gently and preincubate the reaction mix at 30 degree C. for 2 min. Initial the reaction by adding 10 ul of the control enzyme or the filtered supernatant.

[2210] The tyrosine kinase assay reaction is then terminated by adding 10 ul of 120 mm EDTA and place the reactions on ice.

[2211] Tyrosine kinase activity is determined by transferring 50 ul aliquot of reaction mixture to a microtiter plate (MTP) module and incubating at 37 degree C. for 20 min. This allows the streptavidin coated 96 well plate to associate with the biotinylated peptide. Wash the MTP module with 300 ul/well of PBS four times. Next add 75 ul of anti-phospotyrosine antibody conjugated to horse radish peroxidase (anti-P-Tyr-POD (0.5 u/ml)) to each well and incubate at 37 degree C. for one hour. Wash the well as above.

[2212] Next add 100 ul of peroxidase substrate solution (Boehringer Mannheim) and incubate at room temperature for at least 5 mins (up to 30 min). Measure the absorbance of the sample at 405 nm by using ELISA reader. The level of bound peroxidase activity is quantitated using an ELISA reader and reflects the level of tyrosine kinase activity.

### Example 39

### High-Throughput Screening Assay Identifying Phosphorylation Activity

[2213] As a potential alternative and/or complement to the assay of protein tyrosine kinase activity described in Example 38, an assay which detects activation (phosphorylation) of major intracellular signal transduction intermediates can also be used. For example, as described below one particular assay can detect tyrosine phosphorylation of the Erk-1 and Erk-2 kinases. However, phosphorylation of other molecules, such as Raf, JNK, p38 MAP, Map kinase kinase (MEK), MEK kinase, Src, Muscle specific kinase (MuSK), IRAK, Tec, and Janus, as well as any other phosphoserine, phosphotyrosine, or phosphothreonine molecule, can be detected by substituting these molecules for Erk-1 or Erk-2 in the following assay.

[2214] Specifically, assay plates are made by coating the wells of a 96-well ELISA plate with 0.1 ml of protein G (1 ug/ml) for 2 hr at room temp, (RT). The plates are then rinsed with PBS and blocked with 3% BSA/PBS for 1 hr at RT. The protein G plates are then treated with 2 commercial monoclonal antibodies (10 ng/well) against Erk-1 and Erk-2 (1 hr at RT) (Santa Cruz Biotechnology). (To detect other molecules, this step can easily be modified by substituting a monoclonal antibody detecting any of the above described molecules.) After 3-5 rinses with PBS, the plates are stored at 4 degree C. until use.

[2215] A431 cells are seeded at 20,000/well in a 96-well Loprodyne filterplate and cultured overnight in growth medium. The cells are then starved for 48 hr in basal medium (DMEM) and then treated with EGF (6 ng/well) or 50 ul of the supernatants obtained in Example 30 for 5-20 minutes. The cells are then solubilized and extracts filtered directly into the assay plate.

[2216] After incubation with the extract for 1 hr at RT, the wells are again rinsed. As a positive control, a commercial preparation of MAP kinase (10 ng/well) is used in place of A431 extract. Plates are then treated with a commercial polyclonal (rabbit) antibody (1 ug/ml) which specifically recognizes the phosphorylated epitope of the Erk-1 and Erk-2 kinases (1 hr at RT). This antibody is biotinylated by standard procedures. The bound polyclonal antibody is then quantitated by successive incubations with Europium-streptavidin and Europium fluorescence enhancing reagent in the Wallac DELFIA instrument (time-resolved fluorescence). An increased fluorescent signal over background indicates a phosphorylation by polypeptide of the present invention or a molecule induced by polypeptide of the present invention.

### Example 40

### Assay for the Stimulation of Bone Marrow CD34+ Cell Proliferation

[2217] This assay is based on the ability of human CD34+ to proliferate in the presence of hematopoietic growth factors and evaluates the ability of isolated polypeptides expressed in mammalian cells to stimulate proliferation of CD34+ cells.

[2218] It has been previously shown that most mature precursors will respond to only a single signal. More immature precursors require at least two signals to respond. Therefore, to test the effect of polypeptides on hematopoietic activity of a wide range of progenitor cells, the assay contains a given polypeptide in the presence or absence of other hematopoietic growth factors. Isolated cells are cultured for 5 days in the presence of Stem Cell Factor (SCF) in combination with tested sample. SCF alone has a very limited effect on the proliferation of bone marrow (BM) cells, acting in such conditions only as a “survival” factor. However, combined with any factor exhibiting stimulatory effect on these cells (e.g., IL-3), SCF will cause a synergistic effect. Therefore, if the tested polypeptide has a stimulatory effect on hematopoietic progenitors, such activity can be easily detected. Since normal BM cells have a low level of cycling cells, it is likely that any inhibitory effect of a given polypeptide, or agonists or antagonists thereof, might not be detected. Accordingly, assays for an inhibitory effect on progenitors is preferably tested in cells that are first subjected to in vitro stimulation with SCF+IL+3, and then contacted with the compound that is being evaluated for inhibition of such induced proliferation.

[2219] Briefly, CD34+ cells are isolated using methods known in the art. The cells are thawed and resuspended in medium (QBSF 60 serum-free medium with 1% L-glutamine (500 ml) Quality Biological, Inc., Gaithersburg, Md. Cat# 160-204-101). After several gentle centrifugation steps at 200×g, cells are allowed to rest for one hour. The cell count is adjusted to 2.5×10⁵ cells/ml. During this time, 100 μl of sterile water is added to the peripheral wells of a 96-well plate. The cytokines that can be tested with a given polypeptide in this assay is rhSCF (R&D Systems, Minneapolis, Minn., Cat# 255-SC) at 50 ng/ml alone and in combination with rhSCF and rhIL-3 (R&D Systems, Minneapolis, Minn., Cat# 203-ML) at 30 ng/ml. After one hour, 10 μl of prepared cytokines, 50 μl of the supernatants prepared in Example 30 (supernatants at 1:2 dilution=50 μl) and 20 μl of diluted cells are added to the media which is already present in the wells to allow for a final total volume of 100 μl. The plates are then placed in a 37° C./5% CO₂ incubator for five days.

[2220] Eighteen hours before the assay is harvested, 0.5 μCi/well of [3H] Thymidine is added in a 10 μl volume to each well to determine the proliferation rate. The experiment is terminated by harvesting the cells from each 96-well plate to a filtermat using the Tomtec Harvester 96. After harvesting, the filtermats are dried, trimmed and placed into OmniFilter assemblies consisting of one OmniFilter plate and one OmniFilter Tray. 60 μl Microscint is added to each well and the plate sealed with TopSeal-A press-on sealing film A bar code 15 sticker is affixed to the first plate for counting. The sealed plates are then loaded and the level of radioactivity determined via the Packard Top Count and the printed data collected for analysis. The level of radioactivity reflects the amount of cell proliferation.

[2221] The studies described in this example test the activity of a given polypeptide to stimulate bone marrow CD34+ cell proliferation. One skilled in the art could easily modify the exemplified studies to test the activity of polynucleotides (e.g., gene therapy), antibodies, agonists, and/or antagonists and fragments and variants thereof. As a nonlimiting example, potential antagonists tested in this assay would be expected to inhibit cell proliferation in the presence of cytokines and/or to increase the inhibition of cell proliferation in the presence of cytokines and a given polypeptide. In contrast, potential agonists tested in this assay would be expected to enhance cell proliferation and/or to decrease the inhibition of cell proliferation in the presence of cytokines and a given polypeptide.

[2222] The ability of a gene to stimulate the proliferation of bone marrow CD34+ cells indicates that polynucleotides and polypeptides corresponding to the gene are useful for the diagnosis and treatment of disorders affecting the immune system and hematopoiesis. Representative uses are described in the “Immune Activity” and “Infectious Disease” sections above, and elsewhere herein.

### Example 41

### Assay for Extracellular Matrix Enhanced Cell Response (EMECR)

[2223] The objective of the Extracellular Matrix Enhanced Cell Response (EMECR) assay is to identify gene products (e.g., isolated polypeptides) that act on the hematopoietic stem cells in the context of the extracellular matrix (ECM) induced signal.

[2224] Cells respond to the regulatory factors in the context of signal(s) received from the surrounding microenvironment. For example, fibroblasts, and endothelial and epithelial stem cells fail to replicate in the absence of signals from the ECM. Hematopoietic stem cells can undergo self-renewal in the bone marrow, but not in in vitro suspension culture. The ability of stem cells to undergo self-renewal in vitro is dependent upon their interaction with the stromal cells and the ECM protein fibronectin (fn). Adhesion of cells to fn is mediated by the α₅.β₁ and α₄.β₁ integrin receptors, which are expressed by human and mouse hematopoietic stem cells. The factor(s) which integrate with the ECM environment and are responsible for stimulating stem cell self-renewal havea not yet been identified. Discovery of such factors should be of great interest in gene therapy and bone marrow transplant applications

[2225] Briefly, polystyrene, non tissue culture treated, 96-well plates are coated with fn fragment at a coating concentration of 0.2 μg/cm². Mouse bone marrow cells are plated (1,000 cells/well) in 0.2 ml of serum-free medium. Cells cultured in the presence of IL-3 (5 ng/ml)+SCF (50 ng/ml) would serve as the positive control, conditions under which little self-renewal but pronounced differentiation of the stem cells is to be expected. Gene products of the invention (e.g., including, but not limited to, polynucleotides and polypeptides of the present invention, and supernatants produced in Example 30), are tested with appropriate negative controls in the presence and absence of SCF (5.0 ng/ml), where test factor supernatants represent 10% of the total assay volume. The plated cells are then allowed to grow by incubating in a low oxygen environment (5% CO₂, 7% O₂, and 88% N₂) tissue culture incubator for 7 days. The number of proliferating cells within the wells is then quantitated by measuring thymidine incorporation into cellular DNA. Verification of the positive hits in the assay will require phenotypic characterization of the cells, which can be accomplished by scaling up of the culture system and using appropriate antibody reagents against cell surface antigens and FACScan.

[2226] One skilled in the art could easily modify the exemplified studies to test the activity of polynucleotides (e.g., gene therapy), antibodies, agonists, and/or antagonists and fragments and variants thereof.

[2227] If a particular polypeptide of the present invention is found to be a stimulator of hematopoietic progenitors, polynucleotides and polypeptides corresponding to the gene encoding said polypeptide may be useful for the diagnosis and treatment of disorders affecting the immune system and hematopoiesis. Representative uses are described in the “Immune Activity” and “Infectious Disease” sections above, and elsewhere herein. The gene product may also be useful in the expansion of stem cells and committed progenitors of various blood lineages, and in the differentiation and/or proliferation of various cell types.

[2228] Additionally, the polynucleotides and/or polypeptides of the gene of interest and/or agonists and/or antagonists thereof, may also be employed to inhibit the proliferation and differentiation of hematopoietic cells and therefore may be employed to protect bone marrow stem cells from chemotherapeutic agents during chemotherapy. This antiproliferative effect may allow administration of higher doses of chemotherapeutic agents and, therefore, more effective chemotherapeutic treatment.

[2229] Moreover, polynucleotides and polypeptides corresponding to the gene of interest may also be useful for the treatment and diagnosis of hematopoietic related disorders such as, for example, anemia, pancytopenia, leukopenia, thrombocytopenia or leukemia since stromal cells are important in the production of cells of hematopoietic lineages. The uses include bone marrow cell ex-vivo culture, bone marrow transplantation, bone marrow reconstitution, radiotherapy or chemotherapy of neoplasia.

### Example 42

### Human Dermal Fibroblast and Aortic Smooth Muscle Cell Proliferation

[2230] The polypeptide of interest is added to cultures of normal human dermal fibroblasts (NHDF) and human aortic smooth muscle cells (AoSMC) and two co-assays are performed with each sample. The first assay examines the effect of the polypeptide of interest on the proliferation of normal human dermal fibroblasts (NHDF) or aortic smooth muscle cells (AoSMC). Aberrant growth of fibroblasts or smooth muscle cells is a part of several pathological processes, including fibrosis, and restenosis. The second assay examines IL6 production by both NHDF and SMC. IL6 production is an indication of functional activation. Activated cells will have increased production of a number of cytokines and other factors, which can result in a proinflammatory or immunomodulatory outcome. Assays are run with and without co-TNFa stimulation, in order to check for costimulatory or inhibitory activity.

[2231] Briefly, on day 1, 96-well black plates are set up with 1000 cells/well (NHDF) or 2000 cells/well (AoSMC) in 100 μl culture media. NHDF culture media contains: Clonetics FB basal media, 1 mg/ml hFGF, 5 mg/ml insulin, 50 mg/ml gentamycin, 2% FBS, while AoSMC culture media contains Clonetics SM basal media, 0.5 μg/ml hEGF, 5 mg/ml insulin, 1 μg/ml hFGF, 50 mg/ml gentamycin, 50 μg/ml Amphotericin B, 5% FBS. After incubation at 37° C. for at least 4-5 hours culture media is aspirated and replaced with growth arrest media. Growth arrest media for NHDF contains fibroblast basal media, 50 mg/ml gentamycin, 2% FBS, while growth arrest media for AoSMC contains SM basal media, 50 mg/ml gentamycin, 50 μg/ml Amphotericin B, 0.4% FBS. Incubate at 37° C. until day 2.

[2232] On day 2, serial dilutions and templates of the polypeptide of interest are designed such that they always include media controls and known-protein controls. For both stimulation and inhibition experiments, proteins are diluted in growth arrest media. For inhibition experiments, TNFa is added to a final concentration of 2 ng/ml (NHDF) or 5 ng/ml (AoSMC). Add ⅓ vol media containing controls or polypeptides of the present invention and incubate at 37 degrees C./5% CO₂ until day 5.

[2233] Transfer 60 μl from each well to another labeled 96-well plate, cover with a plate-sealer, and store at 4 degrees C. until Day 6 (for IL6 ELISA). To the remaining 100 μl in the cell culture plate, aseptically add Alamar Blue in an amount equal to 10% of the culture volume (10 μl). Return plates to incubator for 3 to 4 hours. Then measure fluorescence with excitation at 530 nm and emission at 590 nm using the CytoFluor. This yields the growth stimulation/inhibition data.

[2234] On day 5, the IL6 ELISA is performed by coating a 96 well plate with 50-100 ul/well of Anti-Human IL6 Monoclonal antibody diluted in PBS, pH 7.4, incubate ON at room temperature.

[2235] On day 6, empty the plates into the sink and blot on paper towels. Prepare Assay Buffer containing PBS with 4% BSA. Block the plates with 200 μl/well of Pierce Super Block blocking buffer in PBS for 1-2 hr and then wash plates with wash buffer (PBS, 0.05% Tween-20). Blot plates on paper towels. Then add 50 μl/well of diluted Anti-Human IL-6 Monoclonal, Biotin-labeled antibody at 0.50 mg/ml. Make dilutions of IL-6 stock in media (30, 10, 3, 1, 0.3, 0 ng/ml). Add duplicate samples to top row of plate. Cover the plates and incubate for 2 hours at RT on shaker.

[2236] Plates are washed with wash buffer and blotted on paper towels. Dilute EU-labeled Streptavidin 1:1000 in Assay buffer, and add 100 μl/well. Cover the plate and incubate 1 h at RT. Plates are again washed with wash buffer and blotted on paper towels.

[2237] Add 100 μl/well of Enhancement Solution. Shake for 5 minutes. Read the plate on the Wallac DELFIA Fluorometer. Readings from triplicate samples in each assay were tabulated and averaged.

[2238] A positive result in this assay suggests AoSMC cell proliferation and that the polypeptide of the present invention may be involved in dermal fibroblast proliferation and/or smooth muscle cell proliferation. A positive result also suggests many potential uses of polypeptides, polynucleotides, agonists and/or antagonists of the polynucleotide/polypeptide of the present invention which gives a positive result. For example, inflammation and immune responses, wound healing, and angiogenesis, as detailed throughout this specification. Particularly, polypeptides of the present invention and polynucleotides of the present invention may be used in wound healing and dermal regeneration, as well as the promotion of vasculogenesis, both of the blood vessels and lymphatics. The growth of vessels can be used in the treatment of, for example, cardiovascular diseases. Additionally, antagonists of polypeptides and polynucleotides of the invention may be useful in treating diseases, disorders, and/or conditions which involve angiogenesis by acting as an anti-vascular agent (e.g., anti-angiogenesis). These diseases, disorders, and/or conditions are known in the art and/or are described herein, such as, for example, malignancies, solid tumors, benign tumors, for example hemangiomas, acoustic neuromas, neurofibromas, trachomas, and pyogenic granulomas; artheroscleric plaques; ocular angiogenic diseases, for example, diabetic retinopathy, retinopathy of prematurity, macular degeneration, corneal graft rejection, neovascular glaucoma, retrolental fibroplasia, rubeosis, retinoblastoma, uvietis and Pterygia (abnormal blood vessel growth) of the eye; rheumatoid arthritis; psoriasis; delayed wound healing; endometriosis; vasculogenesis; granulations; hypertrophic scars (keloids); nonunion fractures; scleroderma; trachoma; vascular adhesions; myocardial angiogenesis; coronary collaterals; cerebral collaterals; arteriovenous malformations; ischemic limb angiogenesis; Osler-Webber Syndrome; plaque neovascularization; telangiectasia; hemophiliac joints; angiofibroma; fibromuscular dysplasia; wound granulation; Crohn's disease; and atherosclerosis. Moreover, antagonists of polypeptides and polynucleotides of the invention may be useful in treating anti-hyperproliferative diseases and/or anti-inflammatory known in the art and/or described herein.

[2239] One skilled in the art could easily modify the exemplified studies to test the activity of polynucleotides (e.g., gene therapy), antibodies, agonists, and/or antagonists and fragments and variants thereof.

### Example 43

### Cellular Adhesion Molecule (CAM) Expression on Endothelial Cells

[2240] The recruitment of lymphocytes to areas of inflammation and angiogenesis involves specific receptor-ligand interactions between cell surface adhesion molecules (CAMs) on lymphocytes and the vascular endothelium. The adhesion process, in both normal and pathological settings, follows a multi-step cascade that involves intercellular adhesion molecule-1 (ICAM-1), vascular cell adhesion molecule-1 (VCAM-1), and endothelial leukocyte adhesion molecule-1 (E-selectin) expression on endothelial cells (EC). The expression of these molecules and others on the vascular endothelium determines the efficiency with which leukocytes may adhere to the local vasculature and extravasate into the local tissue during the development of an inflammatory response. The local concentration of cytokines and growth factor participate in the modulation of the expression of these CAMs.

[2241] Briefly, endothelial cells (e.g., Human Umbilical Vein Endothelial cells (HUVECs)) are grown in a standard 96 well plate to confluence, growth medium is removed from the cells and replaced with 100 μl of 199 Medium (10% fetal bovine serum (FBS)). Samples for testing and positive or negative controls are added to the plate in triplicate (in 10 μl volumes). Plates are then incubated at 37° C. for either 5 h (selectin and integrin expression) or 24 h (integrin expression only). Plates are aspirated to remove medium and 100 μl of 0.1% paraformaldehyde-PBS (with Ca++ and Mg++) is added to each well. Plates are held at 4° C. for 30 min. Fixative is removed from the wells and wells are washed 1× with PBS(+Ca,Mg)+0.5% BSA and drained. 10 μl of diluted primary antibody is added to the test and control wells. Anti-ICAM-1-Biotin, Anti-VCAM-1-Biotin and Anti-E-selectin-Biotin are used at a concentration of 10 μg/ml (1:10 dilution of 0.1 mg/ml stock antibody). Cells are incubated at 37° C. for 30 min. in a humidified environment. Wells are washed three times with PBS(+Ca,Mg)+0.5% BSA. 20 μl of diluted ExtrAvidin-Alkaline Phosphatase (1:5,000 dilution, referred to herein as the working dilution) are added to each well and incubated at 37° C. for 30 min. Wells are washed three times with PBS(+Ca,Mg)+0.5% BSA. Dissolve 1 tablet of p-Nitrophenol Phosphate pNPP per 5 ml of glycine buffer (pH 10.4). 100 μl of pNPP substrate in glycine buffer is added to each test well. Standard wells in triplicate are prepared from the working dilution of the ExtrAvidin-Alkaline Phosphotase in glycine buffer: 1:5,000 (10⁰)>10^{-0.5}>10⁻¹>10^{-1.5}. 5 μl of each dilution is added to triplicate wells and the resulting AP content in each well is 5.50 ng, 1.74 ng, 0.55 ng, 0.18 ng. 100 μl of pNNP reagent is then added to each of the standard wells. The plate is incubated at 37° C. for 4 h. A volume of 50 μl of 3M NaOH is added to all wells. The plate is read on a plate reader at 405 nm using the background subtraction option on blank wells filled with glycine buffer only. Additionally, the template is set up to indicate the concentration of AP-conjugate in each standard well [5.50 ng; 1.74 ng; 0.55 ng; 0.18 ng]. Results are indicated as amount of bound AP-conjugate in each sample.

### Example 44

### Alamar Blue Endothelial Cells Proliferation Assay

[2242] This assay may be used to quantitatively determine protein mediated inhibition of bFGF-induced proliferation of Bovine Lymphatic Endothelial Cells (LECs), Bovine Aortic Endothelial Cells (BAECs) or Human Microvascular Uterine Myometrial Cells (UTMECs). This assay incorporates a fluorometric growth indicator based on detection of metabolic activity. A standard Alamar Blue Proliferation Assay is prepared in EGM-2MV with 10 ng/ml of bFGF added as a source of endothelial cell stimulation. This assay may be used with a variety of endothelial cells with slight changes in growth medium and cell concentration. Dilutions of the protein batches to be tested are diluted as appropriate. Serum-free medium (GIBCO SFM) without bFGF is used as a non-stimulated control and Angiostatin or TSP-1 are included as a known inhibitory controls.

[2243] Briefly, LEC, BAECs or UTMECs are seeded in growth media at a density of 5000 to 2000 cells/well in a 96 well plate and placed at 37 degrees C. overnight. After the overnight incubation of the cells, the growth media is removed and replaced with GIBCO EC-SFM. The cells are treated with the appropriate dilutions of the protein of interest or control protein sample(s) (prepared in SFM) in triplicate wells with additional bFGF to a concentration of 10 ng/ml. Once the cells have been treated with the samples, the plate(s) is/are placed back in the 37° C. incubator for three days. After three days 10 ml of stock alamar blue (Biosource Cat# DAL1100) is added to each well and the plate(s) is/are placed back in the 37° C. incubator for four hours. The plate(s) are then read at 530 nm excitation and 590 nm emission using the CytoFluor fluorescence reader. Direct output is recorded in relative fluorescence units.

[2244] Alamar blue is an oxidation-reduction indicator that both fluoresces and changes color in response to chemical reduction of growth medium resulting from cell growth. As cells grow in culture, innate metabolic activity results in a chemical reduction of the immediate surrounding environment. Reduction related to growth causes the indicator to change from oxidized (non-fluorescent blue) form to reduced (fluorescent red) form (i.e., stimulated proliferation will produce a stronger signal and inhibited proliferation will produce a weaker signal and the total signal is proportional to the total number of cells as well as their metabolic activity). The background level of activity is observed with the starvation medium alone. This is compared to the output observed from the positive control samples (bFGF in growth medium) and protein dilutions.

### Example 45

### Detection of Inhibition of a Mixed Lymphocyte Reaction

[2245] This assay can be used to detect and evaluate inhibition of a Mixed Lymphocyte Reaction (MLR) by gene products (e.g., isolated polypeptides). Inhibition of a MLR may be due to a direct effect on cell proliferation and viability, modulation of costimulatory molecules on interacting cells, modulation of adhesiveness between lymphocytes and accessory cells, or modulation of cytokine production by accessory cells. Multiple cells may be targeted by these polypeptides since the peripheral blood mononuclear fraction used in this assay includes T, B and natural killer lymphocytes, as well as monocytes and dendritic cells.

[2246] Polypeptides of interest found to inhibit the MLR may find application in diseases associated with lymphocyte and monocyte activation or proliferation. These include, but are not limited to, diseases such as asthma, arthritis, diabetes, inflammatory skin conditions, psoriasis, eczema, systemic lupus erythematosus, multiple sclerosis, glomerulonephritis, inflammatory bowel disease, crohn's disease, ulcerative colitis, arteriosclerosis, cirrhosis, graft vs. host disease, host vs. graft disease, hepatitis, leukemia and lymphoma.

[2247] Briefly, PBMCs from human donors are purified by density gradient centrifugation using Lymphocyte Separation Medium (LSM®, density 1.0770 g/ml, Organon Teknika Corporation, West Chester, Pa.). PBMCs from two donors are adjusted to 2×10⁶ cells/ml in RPMI-1640 (Life Technologies, Grand Island, N.Y.) supplemented with 10% FCS and 2 mM glutamine. PBMCs from a third donor is adjusted to 2×10⁵ cells/ml. Fifty microliters of PBMCs from each donor is added to wells of a 96-well round bottom microtiter plate. Dilutions of test materials (50 μl) is added in triplicate to microtiter wells. Test samples (of the protein of interest) are added for final dilution of 1:4; rhuIL-2 (R&D Systems, Minneapolis, Minn., catalog number 202-IL) is added to a final concentration of 1 μg/ml; anti-CD4 mAb (R&D Systems, clone 34930.11, catalog number MAB379) is added to a final concentration of 10 μg/ml. Cells are cultured for 7-8 days at 37° C. in 5% CO₂, and 1 μC of [³H] thymidine is added to wells for the last 16 hrs of culture. Cells are harvested and thymidine incorporation determined using a Packard TopCount. Data is expressed as the mean and standard deviation of triplicate determinations.

[2248] Samples of the protein of interest are screened in separate experiments and compared to the negative control treatment, anti-CD4 mAb, which inhibits proliferation of lymphocytes and the positive control treatment, IL-2 (either as recombinant material or supernatant), which enhances proliferation of lymphocytes.

[2249] One skilled in the art could easily modify the exemplified studies to test the activity of polynucleotides (e.g., gene therapy), antibodies, agonists, and/or antagonists and fragments and variants thereof.

### Example 46

### Assays for Protease Activity

[2250] The following assay may be used to assess protease activity of the polypeptides of the invention.

[2251] Gelatin and casein zymography are performed essentially as described (Heusen et al., Anal. Biochem., 102:196-202 (1980); Wilson et al., Journal of Urology, 149:653-658 (1993)). Samples are run on 10% polyacryamide/0.1% SDS gels containing 1% gelain orcasein, soaked in 2.5% triton at room temperature for 1 hour, and in 0.1M glycine, pH 8.3 at 37° C. 5 to 16 hours. After staining in amido black areas of proteolysis apear as clear areas agains the blue-black background. Trypsin (Sigma T8642) is used as a positive control.

[2252] Protease activity is also determined by monitoring the cleavage of n-a-benzoyl-L-arginine ethyl ester (BAEE) (Sigma B-4500. Reactions are set up in (25 mM NaPO₄, 1 mM EDTA, and 1 mM BAEE), pH 7.5. Samples are added and the change in adsorbance at 260 nm is monitored on the Beckman DU-6 spectrophotometer in the time-drive mode. Trypsin is used as a positive control.

[2253] Additional assays based upon the release of acid-soluble peptides from casein or hemoglobin measured as adsorbance at 280 nm or colorimetrically using the Folin method are performed as described in Bergmeyer, et al., Methods of Enzymatic Analysis, 5 (1984). Other assays involve the solubilization of chromogenic substrates (Ward, Applied Science, 251-317 (1983)).

### Example 47

### Identifying Serine Protease Substrate Specificity

[2254] Methods known in the art or described herein may be used to determine the substrate specificity of the polypeptides of the present invention having serine protease activity. A preferred method of determining substrate specificity is by the use of positional scanning synthetic combinatorial libraries as described in GB 2 324 529 (incorporated herein in its entirety).

### Example 48

### Ligand Binding Assays

[2255] The following assay may be used to assess ligand binding activity of the polypeptides of the invention.

[2256] Ligand binding assays provide a direct method for ascertaining receptor pharmacology and are adaptable to a high throughput format. The purified ligand for a polypeptide is radiolabeled to high specific activity (50-2000 Ci/mmol) for binding studies. A determination is then made that the process of radiolabeling does not diminish the activity of the ligand towards its polypeptide. Assay conditions for buffers, ions, pH and other modulators such as nucleotides are optimized to establish a workable signal to noise ratio for both membrane and whole cell polypeptide sources. For these assays, specific polypeptide binding is defined as total associated radioactivity minus the radioactivity measured in the presence of an excess of unlabeled competing ligand. Where possible, more than one competing ligand is used to define residual nonspecific binding.

### Example 49

### Functional Assay in Xenopus Oocytes

[2257] Capped RNA transcripts from linearized plasmid templates encoding the polypeptides of the invention are synthesized in vitro with RNA polymerases in accordance with standard procedures. In vitro transcripts are suspended in water at a final concentration of 0.2 mg/ml. Ovarian lobes are removed from adult female toads, Stage V defolliculated oocytes are obtained, and RNA transcripts (10 ng/oocytc) are injected in a 50 nl bolus using a microinjection apparatus. Two electrode voltage clamps are used to measure the currents from individual Xenopus oocytes in response polypeptides and polypeptide agonist exposure. Recordings are made in Ca2+ free Barth's medium at room temperature. The Xenopus system can be used to screen known ligands and tissue/cell extracts for activating ligands.

### Example 50

### Microphysiometric Assays

[2258] Activation of a wide variety of secondary messenger systems results in extrusion of small amounts of acid from a cell. The acid formed is largely as a result of the increased metabolic activity required to fuel the intracellular signaling process. The pH changes in the media surrounding the cell are very small but are detectable by the CYTOSENSOR microphysiometer (Molecular Devices Ltd., Menlo Park, Calif.). The CYTOSENSOR is thus capable of detecting the activation of polypeptide which is coupled to an energy utilizing intracellular signaling pathway.

### Example 51

### Extract/Cell Supernatant Screening

[2259] A large number of mammalian receptors exist for which there remains, as yet, no cognate activating ligand (agonist). Thus, active ligands for these receptors may not be included within the ligands banks as identified to date. Accordingly, the polypeptides of the invention can also be functionally screened (using calcium, cAMP, microphysiometer, oocyte electrophysiology, etc., functional screens) against tissue extracts to identify its natural ligands. Extracts that produce positive functional responses can be sequentially subfractionated until an activating ligand is isolated and identified.

### Example 52

### Calcium and cAMP Functional Assays

[2260] Seven transmembrane receptors which are expressed in HEK 293 cells have been shown to be coupled functionally to activation of PLC and calcium mobilization and/or cAMP stimulation or inhibition. Basal calcium levels in the HEK 293 cells in receptor-transfected or vector control cells were observed to be in the normal, 100 nM to 200 nM, range. HEK 293 cells expressing recombinant receptors are loaded with fura 2 and in a single day >150 selected ligands or tissue/cell extracts are evaluated for agonist induced calcium mobilization. Similarly, HEK 293 cells expressing recombinant receptors are evaluated for the stimulation or inhibition of cAMP production using standard cAMP quantitation assays. Agonists presenting a calcium transient or cAMP fluctuation are tested in vector control cells to determine if the response is unique to the transfected cells expressing receptor.

### Example 53

### ATP-Binding Assay

[2261] The following assay may be used to assess ATP-binding activity of polypeptides of the invention.

[2262] ATP-binding activity of the polypeptides of the invention may be detected using the ATP-binding assay described in U.S. Pat. No. 5,858,719, which is herein incorporated by reference in its entirety. Briefly, ATP-binding to polypeptides of the invention is measured via photoaffinity labeling with 8-azido-ATP in a competition assay. Reaction mixtures containing 1 mg/ml of the ABC transport protein of the present invention are incubated with varying concentrations of ATP, or the non-hydrolyzable ATP analog adenyl-5′-imidodiphosphate for 10 minutes at 4° C. A mixture of 8-azido-ATP (Sigma Chem. Corp., St. Louis, Mo.) plus 8-azido-ATP (³²P-ATP) (5 mCi/μmol, ICN, Irvine Calif.) is added to a final concentration of 100 μM and 0.5 ml aliquots are placed in the wells of a porcelain spot plate on ice. The plate is irradiated using a short wave 254 nm UV lamp at a distance of 2.5 cm from the plate for two one-minute intervals with a one-minute cooling interval in between. The reaction is stopped by addition of dithiothreitol to a final concentration of 2 mM. The incubations are subjected to SDS-PAGE electrophoresis, dried, and autoradiographed. Protein bands corresponding to the particular polypeptides of the invention are excised, and the radioactivity quantified. A decrease in radioactivity with increasing ATP or adenly-5′-imidodiphosphate provides a measure of ATP affinity to the polypeptides.

### Example 54

### Small Molecule Screening

[2263] This invention is particularly useful for screening therapeutic compounds by using the polypeptides of the invention, or binding fragments thereof, in any of a variety of drug screening techniques. The polypeptide or fragment employed in such a test may be affixed to a solid support, expressed on a cell surface, free in solution, or located intracellularly. One method of drug screening utilizes eukaryotic or prokaryotic host cells which are stably transformed with recombinant nucleic acids expressing the polypeptide or fragment. Drugs are screened against such transformed cells in competitive binding assays. One may measure, for example, the formulation of complexes between the agent being tested and polypeptide of the invention.

[2264] Thus, the present invention provides methods of screening for drugs or any other agents which affect activities mediated by the polypeptides of the invention. These methods comprise contacting such an agent with a polypeptide of the invention or fragment thereof and assaying for the presence of a complex between the agent and the polypeptide or fragment thereof, by methods well known in the art. In such a competitive binding assay, the agents to screen are typically labeled. Following incubation, free agent is separated from that present in bound form, and the amount of free or uncomplexed label is a measure of the ability of a particular agent to bind to the polypeptides of the invention.

[2265] Another technique for drug screening provides high throughput screening for compounds having suitable binding affinity to the polypeptides of the invention, and is described in great detail in European Patent Application 84/03564, published on Sep. 13, 1984, which is herein incorporated by reference in its entirety. Briefly stated, large numbers of different small molecule test compounds are synthesized on a solid substrate, such as plastic pins or some other surface. The test compounds are reacted with polypeptides of the invention and washed. Bound polypeptides are then detected by methods well known in the art. Purified polypeptides are coated directly onto plates for use in the aforementioned drug screening techniques. In addition, non-neutralizing antibodies may be used to capture the peptide and immobilize it on the solid support.

[2266] This invention also contemplates the use of competitive drug screening assays in which neutralizing antibodies capable of binding polypeptides of the invention specifically compete with a test compound for binding to the polypeptides or fragments thereof. In this manner, the antibodies are used to detect the presence of any peptide which shares one or more antigenic epitopes with a polypeptide of the invention.

### Example 55

### Phosphorylation Assay

[2267] In order to assay for phosphorylation activity of the polypeptides of the invention, a phosphorylation assay as described in U.S. Pat. No. 5,958,405 (which is herein incorporated by reference) is utilized. Briefly, phosphorylation activity may be measured by phosphorylation of a protein substrate using gamma-labeled ³²P-ATP and quantitation of the incorporated radioactivity using a gamma radioisotope counter. The polypeptides of the invention are incubated with the protein substrate, ³²P-ATP, and a kinase buffer. The ³²P incorporated into the substrate is then separated from free ³²P-ATP by electrophoresis, and the incorporated ³²P is counted and compared to a negative control. Radioactivity counts above the negative control are indicative of phosphorylation activity of the polypeptides of the invention.

### Example 56

### Detection of Phosphorylation Activity (Activation) of the Polypeptides of the Invention in the Presence of Polypeptide Ligands

[2268] Methods known in the art or described herein may be used to determine the phosphorylation activity of the polypeptides of the invention. A preferred method of determining phosphorylation activity is by the use of the tyrosine phosphorylation assay as described in U.S. Pat. No. 5,817,471 (incorporated herein by reference).

### Example 57

### Identification of Signal Transduction Proteins that Interact with Polypeptides of the Present Invention

[2269] The purified polypeptides of the invention are research tools for the identification, characterization and purification of additional signal transduction pathway proteins or receptor proteins. Briefly, labeled polypeptides of the invention are useful as reagents for the purification of molecules with which it interacts. In one embodiment of affinity purification, polypeptides of the invention are covalently coupled to a chromatography column. Cell-free extract derived from putative target cells, such as carcinoma tissues, is passed over the column, and molecules with appropriate affinity bind to the polypeptides of the invention. The protein complex is recovered from the column, dissociated, and the recovered molecule subjected to N-terminal protein sequencing. This amino acid sequence is then used to identify the captured molecule or to design degenerate oligonucleotide probes for cloning the relevant gene from an appropriate cDNA library.

### Example 58

### IL-6 Bioassay

[2270] To test the proliferative effects of the polypeptides of the invention, the IL-6 Bioassay as described by Marz et al. is utilized (Proc. Natl. Acad. Sci., U.S.A., 95:3251-56 (1998), which is herein incorporated by reference). Briefly, IL-6 dependent B9 murine cells are washed three times in IL-6 free medium and plated at a concentration of 5,000 cells per well in 50 μl, and 50 μl of the IL-6-like polypeptide is added. After 68 hrs. at 37° C., the number of viable cells is measured by adding the tetrazolium salt thiazolyl blue (MTT) and incubating for a further 4 hrs. at 37° C. B9 cells are lysed by SDS and optical density is measured at 570 nm. Controls containing IL-6 (positive) and no cytokine (negative) are utilized. Enhanced proliferation in the test sample(s) relative to the negative control is indicative of proliferative effects mediated by polypeptides of the invention.

### Example 59

### Support of Chicken Embryo Neuron Survival

[2271] To test whether sympathetic neuronal cell viability is supported by polypeptides of the invention, the chicken embryo neuronal survival assay of Senaldi et al is utilized (Proc. Natl. Acad. Sci., U.S.A., 96:11458-63 (1998), which is herein incorporated by reference). Briefly, motor and sympathetic neurons are isolated from chicken embryos, resuspended in L15 medium (with 10% FCS, glucose, sodium selenite, progesterone, conalbumin, putrescine, and insulin; Life Technologies, Rockville, Md.) and Dulbecco's modified Eagles medium [with 10% FCS, glutamine, penicillin, and 25 mM Hepes buffer (pH 7.2); Life Technologies, Rockville, Md.], respectively, and incubated at 37° C. in 5% CO₂ in the presence of different concentrations of the purified IL-6-like polypeptide, as well as a negative control lacking any cytokine. After 3 days, neuron survival is determined by evaluation of cellular morphology, and through the use of the colorimetric assay of Mosmann (Mosmann, T., J. Immunol. Methods, 65:55-63 (1983)). Enhanced neuronal cell viability as compared to the controls lacking cytokine is indicative of the ability of the inventive purified IL-6-like polypeptide(s) to enhance the survival of neuronal cells.

### Example 60

### Assay for Phosphatase Activity

[2272] The following assay may be used to assess serine/threonine phosphatase (PTPase) activity of the polypeptides of the invention.

[2273] In order to assay for serine/threonine phosphatase (PTPase) activity, assays can be utilized which are widely known to those skilled in the art. For example, the serine/threonine phosphatase (PSPase) activity is measured using a PSPase assay kit from New England Biolabs, Inc. Myelin basic protein (MyBP), a substrate for PSPase, is phosphorylated on serine and threonine residues with cAMP-dependent Protein Kinase in the presence of [³²P]ATP. Protein serine/threonine phosphatase activity is then determined by measuring the release of inorganic phosphate from ³²P-labeled MyBP.

### Example 61

### Interaction of Serine/Threonine Phosphatases with Other Proteins

[2274] The polypeptides of the invention with serine/threonine phosphatase activity as determined in Example 60 are research tools for the identification, characterization and purification of additional interacting proteins or receptor proteins, or other signal transduction pathway proteins. Briefly, labeled polypeptide(s) of the invention is useful as a reagent for the purification of molecules with which it interacts. In one embodiment of affinity purification, polypeptide of the invention is covalently coupled to a chromatography column. Cell-free extract derived from putative target cells, such as neural or liver cells, is passed over the column, and molecules with appropriate affinity bind to the polypeptides of the invention. The polypeptides of the invention-complex is recovered from the column, dissociated, and the recovered molecule subjected to N-terminal protein sequencing. This amino acid sequence is then used to identify the captured molecule or to design degenerate oligonucleotide probes for cloning the relevant gene from an appropriate cDNA library.

### Example 62

### Assaying for Heparanase Activity

[2275] In order to assay for heparanase activity of the polypeptides of the invention, the heparanase assay described by Vlodavsky et al. is utilized (Vlodavsky, I., et al., Nat. Med., 5:793-802 (1999)). Briefly, cell lysates, conditioned media or intact cells (1×10⁶ cells per 35-mm dish) are incubated for 18 hrs at 37° C., pH 6.2-6.6, with ³⁵S-labeled ECM or soluble ECM derived peak I proteoglycans. The incubation medium is centrifuged and the supernatant is analyzed by gel filtration on a Sepharose CL-6B column (0.9×30 cm). Fractions are eluted with PBS and their radioactivity is measured. Degradation fragments of heparan sulfate side chains are eluted from Sepharose 6B at 0.5<Kₐᵥ<0.8 (peak II). Each experiment is done at least three times. Degradation fragments corresponding to “peak II,” as described by Vlodavsky et al., is indicative of the activity of the polypeptides of the invention in cleaving heparan sulfate.

### Example 63

### Immobilization of Biomolecules

[2276] This example provides a method for the stabilization of polypeptides of the invention in non-host cell lipid bilayer constucts (see, e.g., Bieri et al., Nature Biotech 17:1105-1108 (1999), hereby incorporated by reference in its entirety herein) which can be adapted for the study of polypeptides of the invention in the various functional assays described above. Briefly, carbohydrate-specific chemistry for biotinylation is used to confine a biotin tag to the extracellular domain of the polypeptides of the invention, thus allowing uniform orientation upon immobilization. A 50 uM solution of polypeptides of the invention in washed membranes is incubated with 20 mM NaIO4 and 1.5 mg/ml (4 mM) BACH or 2 mg/ml (7.5 mM) biotin-hydrazide for 1 hr at room temperature (reaction volume, 150 ul). Then the sample is dialyzed (Pierce Slidealizer Cassett, 10 kDa cutoff; Pierce Chemical Co., Rockford Ill.) at 4 C first for 5 h, exchanging the buffer after each hour, and finally for 12 h against 500 ml buffer R (0.15 M NaCl, 1 mM MgCl2, 10 mM sodium phosphate, pH7). Just before addition into a cuvette, the sample is diluted 1:5 in buffer ROG50 (Buffer R supplemented with 50 mM octylglucoside).

### Example 64

### TAQMAN

[2277] Quantitative PCR (QPCR). Total RNA from cells in culture are extracted by Trizol separation as recommended by the supplier (LifeTechnologies). (Total RNA is treated with DNase I (Life Technologies) to remove any contaminating genomic DNA before reverse transcription.) Total RNA (50 ng) is used in a one-step, 50 ul, RT-QPCR, consisting of Taqman Buffer A (Perkin-Elmer; 50 mM KCl/10 mM Tris, pH 8.3), 5.5 mM MgCl₂, 240 μM each dNTP, 0.4 units RNase inhibitor (Promega), 8% glycerol, 0.012% Tween-20, 0.05% gelatin, 0.3 uM primers, 0.1 uM probe, 0.025 units Amplitaq Gold (Perkin-Elmer) and 2.5 units Superscript II reverse transcriptase (Life Technologies). As a control for genomic contamination, parallel reactions are setup without reverse transcriptase. The relative abundance of (unknown) and 18S RNAs are assessed by using the Applied Biosystems Prism 7700 Sequence Detection System (Livak, K. J., Flood, S. J., Marmaro, J., Giusti, W. & Deetz, K. (1995) PCR Methods Appl. 4, 357-362). Reactions are carried out at 48° C. for 30 min, 95° C. for 10 min, followed by 40 cycles of 95° C. for 15 s, 60° C. for 1 min. Reactions are performed in triplicate.

[2278] Primers (f & r) and FRET probes sets are designed using Primer Express Software (Perkin-Elmer). Probes are labeled at the 5′-end with the reporter dye 6-FAM and on the 3′-end with the quencher dye TAMRA (Biosource International, Camarillo, Calif. or Perkin-Elmer).

### Example 65

### Assays for Metalloproteinase Activity

[2279] Metalloproteinases (EC 3.4.24.-) are peptide hydrolases which use metal ions, such as Zn²⁺, as the catalytic mechanism. Metalloproteinase activity of polypeptides of the present invention can be assayed according to the following methods.

[2280] Proteolysis of Alpha-2-Macroglobulin

[2281] To confirm protease activity, purified polypeptides of the invention are mixed with the substrate alpha-2-macroglobulin (0.2 unit/ml; Boehringer Mannheim, Germany) in 1× assay buffer (50 mM HEPES, pH 7.5, 0.2 M NaCl, 10 mM CaCl₂, 25 μM ZnCl₂ and 0.05% Brij-35) and incubated at 37° C. for 1-5 days. Trypsin is used as positive control. Negative controls contain only alpha-2-macroglobulin in assay buffer. The samples are collected and boiled in SDS-PAGE sample buffer containing 5% 2-mercaptoethanol for 5-min, then loaded onto 8% SDS-polyacrylamide gel. After electrophoresis the proteins are visualized by silver staining. Proteolysis is evident by the appearance of lower molecular weight bands as compared to the negative control.

[2282] Inhibition of Alpha-2-Macroglobulin Proteolysis by Inhibitors of Metalloproteinases

[2283] Known metalloproteinase inhibitors (metal chelators (EDTA, EGTA, AND HgCl₂), peptide metalloproteinase inhibitors (TIMP-1 and TIMP-2), and commercial small molecule MMP inhibitors) are used to characterize the proteolytic activity of polypeptides of the invention. The three synthetic MMP inhibitors used are: MMP inhibitor I, [IC₅₀=1.0 μM against MMP-1 and MMP-8; IC₅₀=30 μM against MMP-9; IC₅₀=150 μM against MMP-3]; MMP-3 (stromelysin-1) inhibitor I [IC₅₀=5 μM against MMP-3], and MMP-3 inhibitor II [Kᵢ=130 nM against MMP-3]; inhibitors available through Calbiochem, catalog # 444250, 444218, and 444225, respectively). Briefly, different concentrations of the small molecule MMP inhibitors are mixed with purified polypeptides of the invention (50 μg/ml) in 22.9 μl of 1×HEPES buffer (50 mM HEPES, pH 7.5, 0.2 M NaCl, 10 mM CaCl₂, 25 μM ZnCl₂ and 0.05% Brij-35) and incubated at room temperature (24° C.) for 2-hr, then 7.1 μl of substrate alpha-2-macroglobulin (0.2 unit/ml) is added and incubated at 37° C. for 20-hr. The reactions are stopped by adding 4× sample buffer and boiled immediately for 5 minutes. After SDS-PAGE, the protein bands are visualized by silver stain.

Synthetic Fluorogenic Peptide Substrates Cleavage Assay

[2284] The substrate specificity for polypeptides of the invention with demonstrated metalloproteinase activity can be determined using synthetic fluorogenic peptide substrates (purchased from BACHEM Bioscience Inc). Test substrates include, M-1985, M-2225, M-2105, M-2110, and M-2255. The first four are MMP substrates and the last one is a substrate of tumor necrosis factor-α (TNF-α) converting enzyme (TACE). All the substrates are prepared in 1:1 dimethyl sulfoxide (DMSO) and water. The stock solutions are 50-500 μM. Fluorescent assays are performed by using a Perkin Elmer LS 50B luminescence spectrometer equipped with a constant temperature water bath. The excitation λ is 328 nm and the emission λ is 393 μm. Briefly, the assay is carried out by incubating 176 μl 1×HEPES buffer (0.2 M NaCl, 10 mM CaCl₂, 0.05% Brij-35 and 50 mM HEPES, pH 7.5) with 4 μl of substrate solution (50 μM) at 25° C. for 15 minutes, and then adding 20 μl of a purified polypeptide of the invention into the assay cuvett. The final concentration of substrate is 1 μM. Initial hydrolysis rates are monitored for 30-min.

### Example 66

### Characterization of the cDNA Contained in a Deposited Plasmid

[2285] The size of the cDNA insert contained in a deposited plasmid may be routinely determined using techniques known in the art, such as PCR amplification using synthetic primers hybridizable to the 3′ and 5′ ends of the cDNA sequence. For example, two primers of 17-30 nucleotides derived from each end of the cDNA (i.e., hybridizable to the absolute 5′ nucleotide or the 3′ nucleotide end of the sequence of SEQ ID NO:X, respectively) are synthesized and used to amplify the cDNA using the deposited cDNA plasmid as a template. The polymerase chain reaction is carried out under routine conditions, for instance, in 25 ul of reaction mixture with 0.5 ug of the above cDNA template. A convenient reaction mixture is 1.5-5 mM MgCl₂, 0.01% (w/v) gelatin, 20 uM each of dATP, dCTP, dGTP, dTTP, 25 pmol of each primer and 0.25 Unit of Taq polymerase. Thirty five cycles of PCR (denaturation at 94 degree C. for 1 min; annealing at 55 degree C. for 1 min; elongation at 72 degree C. for 1 min) are performed with a Perkin-Elmer Cetus automated thermal cycler. The amplified product is analyzed by agarose gel electrophoresis. The PCR product is verified to be the selected sequence by subcloning and sequencing the DNA product. It will be clear that the invention may be practiced otherwise than as particularly described in the foregoing description and examples. Numerous modifications and variations of the present invention are possible in light of the above teachings and, therefore, are within the scope of the appended claims.

### Example 67

### Use of Polypeptides of the Invention Linked to Optical Reporters

[2286] Polypeptides of the invention may be linked to optical reporters (such as, but not limited to, Green Fluorescent Protein (GFP)) for use in therapeutic, diagnostic, and investigative research applications. Methods for making and using polypeptide-linked optical reporters may be performed according to procedures routinely known and used in the art. Some examples of such methods are described in the following review articles, as well as in the references contained therein: Chan, “Monitoring molecular interactions in living cells using flow cytometric analysis of fluorescence resonance energy transfer”, Methods Mol. Biol. 2004; 261:371-82; Choy, et al., “Current advances in molecular imaging: noninvasive in vivo bioluminescent and fluorescent optical imaging in cancer research”, Mol Imaging. 2003 October; 2(4):303-12; Rosochacki, et al., “Green fluorescent protein as a molecular marker in microbiology”, Acta Microbiol Pol. 2002; 51(3):205-16; Medina-Kauwe, et al., “Using GFP—ligand fusions to measure receptor-mediated endocytosis in living cells”, Vitam Horm. 2002; 65:81-95; Hoffman; “Green fluorescent protein imaging of tumour growth, metastasis, and angiogenesis in mouse models”, Lancet Oncol. 2002 September; 3(9):546-56; Ito, et al., “Application of bone marrow-derived stem cells in experimental nephrology”, Exp Nephrol. 2001; 9(6):444-50; and, Wahlfors et al., “Green fluorescent protein (GFP) fusion constructs in gene therapy research”, Histochem Cell Biol. 2001 January; 115(1):59-65.

Incorporation by Reference

[2287] The entire disclosure of each document cited (including patents, patent applications, patent publications, journal articles, abstracts, laboratory manuals, books, or other disclosures) as well as information available through Identifiers specific to databases such as GenBank, GeneSeq, or the CAS Registry, referred to in this application are herein incorporated by reference in their entirety.

[2288] Furthermore, the specification and sequence listing of each of the following applications are herein incorporated by reference in their entirety: PCT/US2003/15439, filed May 16, 2003; U.S. provisional Application No. 60/388,543, filed Jun. 12, 2002; U.S. provisional Application No. 60/401,757, filed Aug. 8, 2002; U.S. provisional Application No. 60/381,592, filed May 17, 2002; U.S. provisional Application No. 60/402,585, filed Aug. 12, 2002; U.S. provisional Application No. 60/404,959, filed Aug. 22, 2002; U.S. provisional Application No. 60/415,902, filed Oct. 4, 2002; and U.S. provisional Application No., 60/402,799, filed Aug. 13, 2002.

The application's sequence listing, which the Patent Office published only in electronic form, follows.

SEQUENCE LISTING (378 sequences)

SEQ ID NO: 1 - DNA, 733 bp, Homo sapiens
gggatccggagcccaaatcttctgacaaaactcacacatgcccaccgtgcccagcacctgaattcgagggtgcaccgtcagtcttcctcttccccccaaaacccaaggacaccctcatgatctcccggactcctgaggtcacatgcgtggtggtggacgtaagccacgaagaccctgaggtcaagttcaactggtacgtggacggcgtggaggtgcataatgccaagacaaagccgcgggaggagcagtacaacagcacgtaccgtgtggtcagcgtcctcaccgtcctgcaccaggactggctgaatggcaaggagtacaagtgcaaggtctccaacaaagccctcccaacccccatcgagaaaaccatctccaaagccaaagggcagccccgagaaccacaggtgtacaccctgcccccatcccgggatgagctgaccaagaaccaggtcagcctgacctgcctggtcaaaggcttctatccaagcgacatcgccgtggagtgggagagcaatgggcagccggagaacaactacaagaccacgcctcccgtgctggactccgacggctccttcttcctctacagcaagctcaccgtggacaagagcaggtggcagcaggggaacgtcttctcatgctccgtgatgcatgaggctctgcacaaccactacacgcagaagagcctctccctgtctccgggtaaatgagtgcgacggccgcgactctagaggat

SEQ ID NO: 2 - protein, 5 aa, Homo sapiens
  Site (3): Xaa equals any of the twenty naturally ocurring L-amino acids
WSXWS

SEQ ID NO: 3 - DNA, 86 bp, Artificial Sequence
  Primer_Bind: Synthetic sequence with 4 tandem copies of the GAS binding site found in the IRF1 promoter (Rothman et al., Immunity 1:457-468 (1994)), 18 nucleotides complementary to the SV40 early promoter, and a Xho I restriction site.
gcgcctcgagatttccccgaaatctagatttccccgaaatgatttccccgaaatgatttccccgaaatatctgccatctcaattag

SEQ ID NO: 4 - DNA, 27 bp, Artificial Sequence
  Primer_Bind: Synthetic sequence complementary to the SV40 promoter; includes a Hind III restriction site.
gcggcaagctttttgcaaagcctaggc

SEQ ID NO: 5 - DNA, 271 bp, Artificial Sequence
  Protein_Bind: Synthetic promoter for use in biological assays; includes GAS binding sites found in the IRF1 promoter (Rothman et al., Immunity 1:457-468 (1994)).
ctcgagatttccccgaaatctagatttccccgaaatgatttccccgaaatgatttccccgaaatatctgccatctcaattagtcagcaaccatagtcccgcccctaactccgcccatcccgcccctaactccgcccagttccgcccattctccgccccatggctgactaattttttttatttatgcagaggccgaggccgcctcggcctctgagctattccagaagtagtgaggaggcttttttggaggcctaggcttttgcaaaaagctt

SEQ ID NO: 6 - DNA, 32 bp, Artificial Sequence
  Primer_Bind: Synthetic primer complementary to human genomic EGR-1 promoter sequence (Sakamoto et al., Oncogene 6:867-871 (1991)); includes a Xho I restriction site.
gcgctcgagggatgacagcgatagaaccccgg

SEQ ID NO: 7 - DNA, 31 bp, Artificial Sequence
  Primer_Bind: Synthetic primer complementary to human genomic EGR-1 promoter sequence (Sakamoto et al., Oncogene 6:867-871 (1991)); includes a Hind III restriction site.
gcgaagcttcgcgactccccggatccgcctc

SEQ ID NO: 8 - DNA, 12 bp, Homo sapiens
ggggactttccc

SEQ ID NO: 9 - DNA, 73 bp, Artificial Sequence
  Primer_Bind: Synthetic primer with 4 tandem copies of the NF-KB binding site (GGGGACTTTCCC), 18 nucleotides complementary to the 5' end of the SV40 early promoter sequence, and a XhoI restriction site.
gcggcctcgaggggactttcccggggactttccggggactttccgggactttccatcctgccatctcaattag

SEQ ID NO: 10 - DNA, 256 bp, Artificial Sequence
  Protein_Bind: Synthetic promoter for use in biological assays; includes NF-KB binding sites.
ctcgaggggactttcccggggactttccggggactttccgggactttccatctgccatctcaattagtcagcaaccatagtcccgcccctaactccgcccatcccgcccctaactccgcccagttccgcccattctccgccccatggctgactaattttttttatttatgcagaggccgaggccgcctcggcctctgagctattccagaagtagtgaggaggcttttttggaggcctaggcttttgcaaaaagctt

SEQ ID NO: 11 - DNA, 2382 bp, Homo sapiens
  misc_feature (2350)..(2350): n equals a,t,g, or c
  misc_feature (2367)..(2367): n equals a,t,g, or c
cctgggcatagagtgaggagcacccaagtggggccagaggaacgttgtgtgtggcagcaaggagcccgcagaggaacatggygctgctctgggggctcctggtgctcagctggtcctgcctgcaaggcccctgctccgtgttctcccctgtgagcgccatggagcccttgggccggcagctaactagcgggccgaaccaggagcaggtgtccccacttaccctcctcaagttgggcaaccaggagcctggtggccagactgcyctgaagagtcccccaggagtctgcagcagagaccccaccccagagcagacccacaggctggcccgggccatgatggccttcactgccgacctgttctccctggtggctcaaacgtccacctgccccaacctcatcctgtcacccctgagtgtggccctggcgctgtctcacctggcactaggtgctcagaaccacacgttgcagaggctgcaacaggtgctgcacgcaggctcagggccctgcctcccccatctgctgagccgcctctgccaggacctgggccccggcgcgttccgactggctgccaggatgtacctgcagaaaggatttcccatcaaagaagatttcctggaacaatccgaacagctatttggggcaaagcccgtgagcctgacgggaaagcaggaagatgacctggcaaacatcaaccaatgggtgaaggaggccacggaggggaagattcaggaattcctctctgggctgccggaagacaccgtgttgcttctcctcaacgccatccacttccagggtttctggaggaacaagtttgacccgagccttacccagagagactccttccacctggacgagcagttcacggtgcccgtggaaatgatgcaggcccgcacgtacccgctgcgctggttcttgctggagcagcctgagatccaggtggctcatttcccctttaagaacaacatgagctttgtggtccttgtacccacccactttgaatggaacgtgtcccaggtactggccaacctgagttgggacaccctgcacccacctctggtgtgggagaggcccaccaaggtccggctgcctaagctgtatctgaaacaccaaatggacctggtggccaccctcagccagctgggcctgcaggagttgttccaggccccagacctgcgtgggatctccgagcagagcctggtggtgtccggcgtgcagcatcagtccaccctggagctcagcgaggtcggcgtggaggcggcggcggccaccagcattgccatgtcccgcatgtccctgtcctccttcagcgtgaaccgccccttcctcttcttcatcttcgaggacaccacaggccttcccctcttcgtgggcagcgtgaggaaccccaaccccagtgcaccgcgggagctcaaggaacagcaggattccccgggcaacaaggacttcctccagagcctgaaaggcttcccccgcggagacaagcttttcggccctgacttaaaacttgtgccccccatggaggaggattacccccagtttggcagccccaagtgaggggccgtggctgtggcatccagagtccctgcctggaccagcctctccactcatgtgactctttccaacckgctttgtggcactggggcaggggccgggggcagtctgagagaggccattctttcccaacacctcttggggagtttagggtgggggggggcgcggctgggaggagggcaggcatcggggagccgggagcctgaccctcatctttcttccaaacaggctcagagggtgtcctgcaccggggcctgggcaggagggaggtgcttctagttctgccaggagacaggttagctgctccccacgtcagctgggacaccccgacttttgtttaccagagaaaaagggagggggagagggctgcctttggacttgtcccgggacacctaggctagggtggggagagacgggccctggtggtggctcgggaggcgaagcgttgtcctcagccccgcgtggaactcgtgtctggcacagcctggctgtggcctaacctgccgagagtccatcagcctccatcctaccccctgtgccttgtcacgccagacttcccacggctcctcgagatcccaacactgccagcatttcccttccttcctctcctgtctccctcctctgcccgggagctcaggaaccgaggcagggaaggatcccatgagctccttaaggctcttttgtaaggtttttgtagtgatttttatgccacctgaataaagaatgaatgggcaaaaaaaaaaaaaaaaaaaaaaaaaaaaaaaaaaaaaaaaaaaaaaaaaaaaaaaaaaaaaaaaaanaaaaaaaaaaaaaaaangagaaaagaggagaa

SEQ ID NO: 12 - DNA, 524 bp, Homo sapiens
agcaaggagcccgcagaggaacatggtgctgctctgggggctcctggtgctcagctggtcctgcctgcaaggcccctgctccgtgttctcccctgtgagcgccatggagcccttgggccggcagctaactagcgggccgaaccaggagcaggtgtccccacttaccctcctcaagttgggcaaccaggagcctggtggccagactgctctgaagagtcccccaggagtctgcagcagagaccccaccccagagcagacccacaggctggcccgggccatgatggccttcactgccgacctgttctccctggtggctcaaacgtccacctgccccaacctcatcctgtcacccctgagtgtggccctggcgctgtctcacctggcactaggtgctcagaaccacacgttgcagaggctgcaacaggtgctgcacgcaggctcagggccctgcctcccccatctgctgagccgcctctgccaggacctgggccccggcgcgttccgactggctgccaggatgtacc

SEQ ID NO: 13 - DNA, 542 bp, Homo sapiens
ccacgcgtccggtgagcagcccctaacaggctgttacttcactacaactgacgatatgatcatcttaatttacttatttctcttgctatgggaagacactcaaggatggggattcaaggatggaatttttcataactccatatggcttgaacgagcagccggtgtgtaccacagagaagcacggtctggcaaatacaagctcacctacgcagaagctaaggcggtgtgtgaatttgaaggcggccatctcgcaacttacaagcagctagaggcagccagaaaaattggatttcatgtctgtgctgctggatggatggctaagggcagagttggataccccattgtgaagccagggcccaactgtggatttggaaaaactggcattattgattatggaatccgtctcaataggagtgaaagatgggatgcctattgctacaacccacacgcaaaggagtgtggyggcgtctttacagatccaaagcgaatttttaaatctccaggcttcccaaatgagtacgaagataaccaaatctgctact

SEQ ID NO: 14 - DNA, 531 bp, Homo sapiens
  misc_feature (437)..(437): n equals a,t,g, or c
ccacgcgtccgagccttctgggggccggcttcctttatctctggcggccttgtagtcgtctccgagactccccacccctccttccctcttgaccccctaggtttgattgccctttccccgaaacaactatcatgagcgcgaggctgccggtgttgtctccacctcggtggccgcggctgttgctgctgtcgctgctcctgctgggggcggttcctggcccgcgccggagcggcgctttctacctgcccggcctggcgcccgtcaacttctgcgacgaagaaaaaaagagcgacgagtgcaaggccgaaatagaactatttgtgaacagacttgattcagtggaatcagttcttccttatgaatacacagcgtttgatttttgccaagcatcagaaggaaagcgcccatctgaaaatcttggtcaggtactattcggngaaagaattgaaccttcaccatataagtttacgtttaataagaaggagacctgtaagcttgtttgtacaaaaacataccatacagagaaagctg

SEQ ID NO: 15 - DNA, 1446 bp, Homo sapiens
gcctggttccacccggggggcatctgagaactgtgtccttccattcctgagtccagcacttcccaggccagccagggtggtgcttgtgtgggaaggactttaaatccagctgccagacccctggacgggagaaggagagacggctggccaccatgcacggctcctgcagtttcctgatgcttctgctgccgctactgctactgctggtggccaccacaggccccgttggagccctcacagatgaggagaaacgtttgatggtggagctgcacaacctctaccgggcccaggtatccccgmcggcctcagacatgctgcacatgagatgggacgaggagctggccgccttcgccaaggcctacgcacggcagtgcgtgtggggccacaacaaggagcgcgggcgccgcggcgagaatctgttcgccatcacagacgagggcatggacgtgccgctggccatggaggagtggcaccacgagcgtgagcactacaacctcagcgccgccacctgcagcccaggccagatgtgcggccactacacgcaggtggtatgggccaagacagagaggatcggctgtggttcccacttctgtgagaagctccagggtgttgaggagaccaacatcgaattactggtgtgcaactatgagcctccggggaacgtgaaggggaaacggccctaccaggaggggactccgtgctcccaatgtccctctggctaccactgcaagaactccctctgtgaacccatcggaagcccggaagatgctcaggatttgccttacctggtaactgaggccccatccttccgggcgactgaagcatcagactctaggaaaatgggtgcagagggccctgacaagcctagcgtcgtgtcagggctgaactcgggccctggtcatgtgtggggccctctcctgggactactgctcctgcctcctctggtgttggctggaatcttctgaaggggataccactcaaagggtgaagaggtcagctgtcctcctgtcatcttccccaccctgtccccagcccctaaacaagatacttcttggttaaggccctccggaagggaaaggctacggggcatgtgcctcatcacaccatccatcctggaggcacaaggcctggctggctgcgagctcaggrggccgcctgaggactgcacaccgggcccacacctctcctgcccctccctcctgagtcctgggggtgggaggatttgagggagctcactgcctacctggcctggggctgtctgcccacacagcatgtgcgctctccctgagtgcctgtgtagctggggatggggattcctaggggcagatgaaggacaagccccactggagtggggttctttgagtgggggaggcagggacgagggaaggaaagyaactcctgactctccaataaaaacctgtccaacctgtgmaaaaaaaaaaaaaa

SEQ ID NO: 16 - DNA, 1337 bp, Homo sapiens
cctccacccacggccgggccttgacgtcatgggctgcggccccctcccggctgarcctataaagcggcaggtgcgcgccgccctacagacgtksgcacacctgggtgccagcgccccagaggtcccgggacagcccgaggcgccgcgcccgccgccccgagctccccaagccttcgagagcggcgcacactcccggtctccactcgctcttccaacacccgctcgttttggcggcagctcgtgtcccagagaccgagttgccccagagaccgagacgccgccgctgcgaaggaccaatgagagccccgctgctaccgccggcgccggtggtgctgtcgctcttgatactcggctcaggccattatgctgctggattggacctcaatgacacctactctgggaagcgtgaaccattttctggggaccacagtgctgatggatttgaggttacctcaagaagtgagatgtcttcagggagtgagatttcccctgtgagtgaaatgccttctagtagtgaaccgtcctcgggagccgactatgactactcagaagagtatgataacgaaccacaaatacctggctatattgtcgatgattcagtcagagttgaacaggtagttaagcccccccaaaacaagacggaaagtgaaaatacttcagataaacccaaaagaaagaaaaagggaggcaaaaatggaaaaaatagaagaaacagaaagaagaaaaatccatgtaatgcagaatttcaaaatttctgcattcacggagaatgcaaatatatagagcacctggaagcagtaacatgcaaatgtcagcaagaatatttcggtgaacggtgtggggaaaagtccatgaaaactcacagcatgattgacagtagtttatcaaaaattgcattagcagccatagctgcctttatgtctgctgtgatcctcacagctgttgctgttattacagtccagcttagaagacaatacgtcaggaaatatgaaggagaagctgaggaacgaaagaaacttcgacaagagaatggaaatgtacatgctatagcataactgaagataaaattacaggatatcacattggagtcactgccaagtcatagccataaatgatgagtcggtcctctttccagtggatcataagacaatggaccctttttgttatgatggttttaaactttcaattgtcactttttatgctatttctgtatataaaggtgcacgaaggtaaaaagtattttttcaagttgtaaataatttatttaatatttaatggaagtgtatttattttacagctcattaaacttttttaaccaaaaaaaaaaaaaaaaaaag

SEQ ID NO: 17 - DNA, 497 bp, Homo sapiens
ccacgcgtccgcagagacccaagcagctggaggctctgtgtgtgggtcgctgatttcttggagcctgaaaagaaggagcagcgactggacccagagccatgtggctgtgccctctggccctcaacctcatcttgatggcagcctctggtgctgcgtgcgaagtgaaggacgtttgtgttggaagccctggtatccccggcactcctggatcccacggcctgccaggcagggacgggagagatggtgtcaaaggagaccctggccctccaggccccatgggtccgcctggagaaacaccatgtcctcctgggaataatgggctgcctggagcccctggtgtccctggagagcgtggagagaagggggaggctggcgagagaggccctccagggcttccagctcatctagatgaggagctccaagccacactccacgacttcagacatcaaatcctgcagacaaggggagccctcagtctgcagggctccataatgaca

SEQ ID NO: 18 - DNA, 521 bp, Homo sapiens
ctcgtgccgaattcggcacgcgyccragcagctggaggctctgtgtgtgggagcagcgactggacccagagccatgtggctgtgccctctggccctcaacctcatcttgatggcagcctctggtgctgtgtgcgaagtgaaggacgtttgtgttggaagccctggtatccccggcactcctggatcccacggcctgccaggcagggacgggagagatggtstcaaaggagaccctggccctccaggccccatgggtccacctggagaaatgccatgtcctcctggaaatgatgggctgcctggagcccctggtatccctggagagtgtggagagaagggggagcctggcgagaggggccctccagggcttccagctcatctagatgaggagctccaagccacactccacgactttagacatcaaatcctgcagacaargggagccctcagtctkcagggctccataatgacagtaggagagaaggkcttctccagcaatgsgcartccatcacttttgatg

SEQ ID NO: 19 - DNA, 964 bp, Homo sapiens
  misc_feature (954)..(954): n equals a,t,g, or c
gcggacgcgtgggcggacacaccatgattaggaccctgctgctgtccactttggtggctggagccctcagttgtggggtctccacttacgcgcctgatatgtctaggatgcttggmggtgaagaagcgaggcccaacagctggccctggcaggtctccctgcagtacagctccaatggcaagtggtaccacacctgcggagggtccctgatagccaacagctgggtcctgacggctgcccactgcatcagctcctccaggacctaccgcgtggggctgggccggcacaacctctacgttgcggagtccggctcgctggcmgtcagtgtctctaagattgtggtgcacaaggactggaactccaaccaaatctccaaagggaacgacattgccctgctcaaactggctaaccccgtctccctcaccgacaagatccagctggcctgcctccctcctgccggcaccattctacccaacaactacccctgctacgtcacgggctggggaaggctgcagaccaacggggctgttcctgatgtcctgcagcagggccggttgctggttgtggactatgccacctgctccagctctgcctggtggggcagcagcgtgaaaaccagtatgatctgtgctgggggtgatggcgtgatctccagctgcaacggagactctggcgggccactgaactgtcaggcgtctgacggccggtggcaggtgcacggcatcgtcagcttcgggtctcgcctcggctgcaactactaccacaagccctccgtcttcacgcgggtctccaattacatcgactggatcaattcggtgattgcaaataactaaccaaaagaagtccctgggactgtttcagacttggaaaggtcacagaaggaaaataatataataaagtgacaactatgcaaaaaaaaaaaaaaaaaaagggsgsccttttaaaggatccaantttacttacc

SEQ ID NO: 20 - DNA, 495 bp, Homo sapiens
ccacgcgtccgcaggagagaaagctctcttggaggagctggaaaggtgcccgactccagccatgctggcgctactgtgttcctgcctgctcctggcagccggtgcctcggacgcctggacgggcgaggactcggcggagcccaactctgactcggcggagtggatccgagacatgtacgccaaggtcacggagatctggcaggaggtcatgcagcggcgggacgacgacggcgcgctccacgccgcctgccaggtgcagccgtcggccacgttggacgccgcgcagccccgggtgaccggcgtcgtcctcttccggcagcttgcgccccgcgccaagctcgacgccttcttcgccctggagggcttcccgaccgagccgaacagctccagccgcgccatccacgtgcaccagttcggsgacctgagccaggkctgcgagtccaccgggccccactacaacccgctggccgtgccgaacccgaagcaaccgggcga

SEQ ID NO: 21 - DNA, 2600 bp, Homo sapiens
  misc_feature (2598)..(2598): n equals a,t,g, or c
ccgactcatccggtgcttgcgtgtggtggtgagcgcagcgccgaggatgaggaggtgcaacagcggctccgggccgccgccgtcgctgctgctgctgctgctgtggctgctcgcggttcccggcgctaacgcggccccgcggtcggcgctctattcgccttccgacccgctgacgctgctgcaggcggacacggtgcgcggcgcggtgctgggctcccgcagcgcctgggccgtggagttcttcgcctcctggtgcggccactgcatcgccttcgccccgacgtggaaggcgctggccgaagacgtcaaagcctggaggccggccctgtatctcgccgccctggactgtgctgaggagaccaacagtgcagtctgcagagacttcaacatccctggcttcccgactgtgaggttcttcaaggcctttaccaagaacggctcgggagcagtatttccagtggctggtgctgacgtgcagacgctgcgggagaggctcattgacgccctggagtcccatcatgacacgtggcccccagcctgtcccccactggagcctgccaagctggaggagattgatggattctttgcgagaaataacgaagagtacctggctctgatctttgaaaagggaggctcctacctgggtagagaggtggctctggacctgtcccagcacaaaggcgtggcggtgcgcagggtgctgaacacagaggccaatgtggtgagaaagtttggtgtcaccgacttcccctcttgctacctgctgttccggaatggctctgtctcccgagtccccgtgctcatggaatccaggtccttctataccgcttacctgcagagactctctgggctcaccagggaggctgcccagaccacagttgcaccaaccactgctaacaagatagctcccactgtttggaaattggcagatcgctccaagatctacatggctgacctggaatctgcactgcactacatcctgcggatagaagtgggcaggttcccggtcctggaagggcagcgcctggtggccctgaaaaagtttgtggcagtgctggccaagtatttccctggccggcccttagtccagaacttcctgcactccgtgaatgaatggctcaagaggcagaagagaaataaaattccctacagtttctttaaaactgccctggacgacaggaaagagggtgccgttcttgccaagaaggtgaactggattggctgccaggggagtgagccgcatttccggggctttccctgctccctgtgggtcctcttccacttcttgactgtgcaggcagctcggcaaaatgtagaccactcacaggaagcagccaaggccaaggaggtcctcccagccatccgaggctacgtgcactacttcttcggctgccgagactgcgctagccacttcgagcagatggctgctgcctccatgcaccgggtggggagtcccaacgccgctgtcctctggctctggtctagccacaacagggtcaatgctcgccttgcaggtgcccccagcgaggacccccagttccccaaggtgcagtggccaccccgtgaactttgttctgcctgccacaatgaacgcctggatgtgcccgtgtgggacgtggaagccaccctcaacttcctcaaggcccacttctccccaagcaacatcatcctggacttccctgcagctgggtcagctgcccggagggatgtgcagaatgtggcagccgccccagagctggcgatgggagccctggagctggaaagccggaattcaactctggaccctgggaagcctgagatgatgaagtcccccacaaacaccaccccacatgtgccggctgagggacctgagcttatttgaagtcctgcctcattctcactggagcctcagtctctcctgcttggtcttggccctcaactggggcaagtgaagccagaggagggtcccccagctgggtgggctggaatggaactcctcactagctgctggggctccgcccaccctgctcccttccggacaatgaagaagcctttgcaccctgggaggaaggaccaccccgggccctctatgcctggccagcctccagctcctcagacctcctgggtggggtttggcttcagggtggggtttggaagcttctggaagtcgtgctggtctcccaggtgaggcaagccatggttgctgggctgtagggtgagtggcttgcttggtgggacctgacgagttggtggcatgggaaggatgtgggtctctagtgccttgccctggcttagctgcaggagaagatggctgctttcacttccccccattgagctctgctccctctgagcctggtcttttgtccttttttattttggtctccaagatgaatgctcatctttggagggtgccaggtagaagctagggaggggagtgtcttctctctccaggtttcaccttccagtgtgcagaagttagaagggtctggcgggggcagtgccttacacatgcttgattcccacgctaccccctgccttgggaggtgtgtggaataaattatttttgttaaggcaaaaaaaaaaaaaaaaaaaaaaggggggccccctaaaaaaaccaantt

SEQ ID NO: 22 - DNA, 722 bp, Homo sapiens
ccacgcgtccggattctgcatctggaaactgccttcatcttgaaagaaaagctccaggtcccttctccagccacccagccccaagatggtgatgctgctgctgctgctttccgcactggctggcctcttcggtgcggcagagggacaagcatttcatcttgggaagtgccccaatcctccggtgcaggagaattttgacgtgaataagtatctcggaagatggtacgaaattgagaagatcccaacaacctttgagaatggacgctgcatccaggccaactactcactaatggaaaacggaaagatcaaagtgttaaaccaggagttgagagctgatggaactgtgaatcaaatcgaaggtgaagccaccccagttaacctcacagagcctgccaagctggaagttaagttttcctggtttatgccatcggcaccgtactggatcctggccaccgactatgagaactatgccctcgtgtattcctgtacctgcatcatccaactttttcacgtggattttgcttggatcttggcaagaaaccctaatctccctccagaaacagkggactctctaaaaaatatcctgacttctaataacattgatgtcaagaaaatgacggtcacagaccaggtgaactgccccaagctctcgtaaccaggttctacagggaggctgcacccactccatggtacttctgcttcgctttcccctaccccacccc

SEQ ID NO: 23 - DNA, 564 bp, Homo sapiens
ccacgcgtccgcagagacccaagcagctggaggctctgtgtgtgggtcgctgatttcttggagcctgaaaagaaagtaacacagcagggatgaggacagatggtgtgagtcagtgagagcagcgactggacccagagccatgtggctgtgccctctggccctcaacctcatcttgatggcagcctctggtgctgtgtgcgaagtgaaggacgtttgtgttggaagccctggtatccccggcactcctggatcccatggcctgccaggcagggacgggagagatggtctcaaaggagaccctggccctccaggccccatgggtccacctggagaaatgccatgtcctcctggaaatgatgggctgcctggagcccctggtatccctggagagtgtggagagaagggggagcctggcgagaggggccctccagggcttccagctcatctagatgaggagctccaagccacactccacgactttagacatcaaatcctgcagacaaggggagccctcagtctgcagggcttcataatgaccgcacgatagaaggtcttctccaccaa

SEQ ID NO: 24 - DNA, 535 bp, Homo sapiens
ccacgcgtccggccgggccgggggcgcgcgctctgcgagctggatgtccaggctgcgggcgctgctgggcctcgggctgctggttgcgggctcgcgcctgccgcggatcaaaagccagaccatcgcctgtcgctcgggacccacctggtggggaccgcagcggctgaactcgggtggccgctgggactcagaggtcatggcgagcacggtggtgaagtacctgagccaggaggaggcccaggccgtggaccaggagctatttaacgaataccagttcagcgtggaccaacttatggaactggccgggctgagctgtgctacagccatcgccaaggcatatccccccacgtccatgtccaggagcccccctactgtcctggtcatctgtggcccggggaataatggaggagatggtctggtctgtgctcgacacctcaaactctttggctacgagccaaccatctattaccccaaaaggcctaacaagcccctcttcactgcattggtgacccagtgtcagaaaatggacatccct

SEQ ID NO: 25 - DNA, 1221 bp, Homo sapiens
ggtcgacccacgcgtccgcactcagacaccgtgtcctcttgcctgggagaggggaagcagatctgaggacatctctgtgccaggccagaaaccgcccacctgcagttccttctccgggatggacgtggggcccagctccctgccccaccttgggctgaagctgctgctgctcctgctgctgctgcccctcaggggccaagccaacacaggctgctacgggatcccagggatgcccggcctgcccggggcaccagggaaggatgggtacgacggactgccggggcccaagggggagccaggaatcccagccattcccgggatccgaggacccaaagggcagaagggagaacccggcttacccggccatcctgggaaaaatggccccatgggaccccctgggatgccaggggtgcccggccccatgggcatccctggagagccaggtgaggagggcagatacaagcagaaattccagtcagtgttcacggtcactcggcagacccaccagccccctgcacccaacagcctgatcagattcaacgcggtcctcaccaacccgcagggagattatgacacgagcactggcaagttcacctgcaaagtccccggcctctactactttgtctaccacgcgtcgcatacagccaacctgtgcgtgctgctgtaccgcagcggcgtcaaagtggtcaccttctgtggccacacgtccaaaaccaatcaggtcaactcgggcggtgtgctgctgaggttgcaggtgggcgaggaggtgtggctggctgtcaatgactactacgacatggtgggcatccagggctctgacagcgtcttctccggcttcctgctcttccccgactagggcgggcagatgcgctcgagacccacgggccttccacctccctcagcttcctgcatggacccaccttactggccagtctgcatccttgcctagaccattctcccctccagggagcccaccctgacccacccccactgcaccccctccccatgggttctctccttcctctgaacttctttaggagtcactgcttgtgtggttcctgggacacttaaccaatgccttctggtactgccattcttttttttttttttcaagtattggaaggggtggggagatatataaataaatcatgaaatcaatamaaaaaaaaaaaaaaaaaaaaaaaaaaaaaaaaaaaaaaaaaaaaaaaaaaaagggcggcc

SEQ ID NO: 26 - DNA, 790 bp, Homo sapiens
cccttccccttccatccctgacaccccattgacttgtgctaacagctctttgccccacaggtgtgacaagccccgccaagacagacctgcaagtcttcgtctcaagggacctccctcatgccaggcccctgcctctcacagcagcaccctttcctctcattgtccctgttccctttttgcctgtggatctgtttggccagggtccctggggtcaggaatatttgcaagactcagccagctccttcccagcccagcctcttggggctgggactttctcaccctgcggcaggcacaacagatgctgggacccagtctctgcccaggtcacagcacaagtgcacatcagcactatggggcctatgtcctgcccagagacctctgctccttcctgctcacatccacagtcagggcacggcgcccctcaagaactccagagtcacctgtctcatcggctcccagcaagtgcctctttgtctatgatgtcccccttctctgaggcctggacccacccatctttgtccctggggcctgctcccagccactgaggcccgctctggccaggggagaaggagctgccgtgcgtcttccctgtgccccgtctccctgcttggttctcccctcccttccctggccggctgccatggccaggagctaagtgcctttttgtgtgcaaccacttaccctttctctgaaaaacctgttctcaggaaggatctgataaactcatttactctcaaaaaaaaaaaaaagtcgacgcggccgcgaatttagtagtagtaggcggccgcta

SEQ ID NO: 27 - DNA, 813 bp, Homo sapiens
  misc_feature (22)..(22): n equals a,t,g, or c
gtccccgctcagatccaggccncgaatgggctgggcgggttgcagaagccatcacctgagctacccagggtgggatccctggccccgacctctgtcctgacacgccccaagcggcagcaacaaagccccaattggcctgggcctgggcaggaggagctgggccgggtgccagatactgggatcagccactgcagctccctgagcactctctacagagacgcggaccccagacatgaggaggctcctcctggtcaccagcctggtggttgtgctgctgtgggaggcaggtgcagtcccagcacccaaggtccctatcaagatgcaagtcaaacactggccctcagagcaggacccagagaaggcctggggcgcccgtgtggtggagcctccggagaaggacgaccagctggtggtgctgttccctgtccagaagccgaaactcttgaccaccgaggagaagccacgaggtcagggcaggggccccatccttccaggcaccaaggcctggatggagaccgaggacaccctgggccgtgtcctgagtcccgagcccgaccatgacagcctgtaccaccctccgcctgaggaggaccagggcgaggagaggccccggttgtgggtgatgccaaatcaccaggtgctcctgggaccggaggaagaccaagaccacatctaccacccccagtagggctccaggggccatcactgcccccgccctgtcccaaggcccaggctgttgggactgggaccctccctaccctgccccagctagacaaataaaccccagcaggccgggmaaaaaaaaaaaaaaaa

SEQ ID NO: 28 - DNA, 701 bp, Homo sapiens
  misc_feature (656)..(656): n equals a,t,g, or c
  misc_feature (674)..(674): n equals a,t,g, or c
ccacgcgtscgcgcggatccggcgtcggggcccggcatggcgggggccggggccaagccgggccggacccggacctaaatgcctctgttcttctccgcgctgttggtcttgctgctagttgcgcttagcgccctctttctaggccggtggcttgtggtccggttggccaccaagtggtgtcagcggaagctgcaggcggagctaaagattggctccttccgctttttttggatccagaatgtcagtcttaagtttcagcaacaccagcaaacagtggaaattgataacctgtggatttccagcaaactccttagccatgatcttccacactatgtggcattgtgctttggagaagtgcgtatcagaacggacctacagaaagtttctgacctgtctgccccattctcccagagcgctggggtggatcaaaaggaactgtccttcagcccatccttattgaagatcttctgccaactattctccattcatgtagatgctataaacatcatggttctcaaggtggatacctctgagtccttatggcatattcagatcagtagaagcagatttcttttggatagtgatgggaaaaggctaatctgtgaggtgagcttatgtaagatcaacagcaagttctaaagagtggtcagcttggnaggacacctgccctaagnggaagcctttcacttggcccttgggaa

SEQ ID NO: 29 - DNA, 903 bp, Homo sapiens
  misc_feature (885)..(885): n equals a,t,g, or c
ccacgcgtccgccgctgacaccttccctttcggccttgaggttcccagcctggtggccccaggacgttccggtcgcatggcagagtgctacggacgacgcctatgaagcccttagtccttctagttgcgcttttgctatggccttcgtctgtgccggcttatccgagcataactgtgacacctgatgaagagcaaaacttgaatcattatatacaagttttagagaacctagtacgaagtgttccctctggggagccaggtcgtgagaaaaaatctaactctccaaaacatgtttattctatagcatcaaagggatcaaaatttaaggagctagttacacatggagacgcttcaactgagaatgatgttttaaccaatcctatcagtgaagaaactacaactttccctacaggaggcttcacaccggaaataggaaagaaaaaacacacggaaagtaccccattctggtcgatcaaaccaaacaatgtttccattgktttgcatgcagaggaaccttatattgaaaatgaagagccagagccagagccggagccagctgcaaaacaaactgaggcaccaagaatgttgccagttgttactgaatcatctacaagtccatatgttacctcatacaagtcacctgtcaccactttagataagagcactggcattgggatctctacagaatcagaagatgttcctcagctctcaggtgaaactgcgatagaaaaacccgaaggagtttgggaagcacccagagagttgggawtaatkgatgacattttgaaaaaaattttaggrtattaatttcacaagtggcaacagggsayttttttagtggacaccmggcaacccmgcwtwttrggrggaggrttttggaaggcntcttaaaggttcacctaa

SEQ ID NO: 30 - DNA, 1231 bp, Homo sapiens
  misc_feature (1164)..(1164): n equals a,t,g, or c
  misc_feature (1193)..(1193): n equals a,t,g, or c
  misc_feature (1205)..(1205): n equals a,t,g, or c
cgacagttttccggcctagtttgcggctgctcctgccgtgttgcgtagggcgcctgtgcttgaggttgggggttgcgtcgctctctggtaaaggcgtgcaggtgttggccgcggcctctgagctgggatgagccgtgctcccggtggaagcaagggagcccagccggagccatggccagtacagtggtagcagttggactgaccattgctgctgcaggatttgcaggccgttacgttttgcaagccatgaagcatatggagcctcaagtaaaacaagtttttcaaagcctaccaaaatctgccttcagtggtggctattatagaggtgggtttgaacccaaaatgacaaaacgggaagcagcattaatactaggtgtaagccctactgccaataaagggaaaataagagatgctcatcgacgaattatgcttttaaatcatcctgacaaaggaggatctccttatatagcagccaaaatcaatgaagctaaagatttactagaaggtcaagctaaaaaatgaagtaaatgtatgatgaattttaagttcgtattagtttatgtatatgagtactaagtttttataataaaatgcctcagagctacaattttaaaaaatgatttagcacaagctaaatctcaaagccttggtataattttcttgtttaaatttggggattttaaatcagattatagtttagaatatttgcgtattaattatgggcaagcacacaccttctgaatagaaatattgttcattactcatttagcagataatttgggacctatgtctacttttcaaggcaaagtgaagatgacagtccttgctctcagggagcccccactttaatgggagactgataaactggtaattagactgtgataaatagtatgatggaaattagcttaagctgtttaagtagggactcttcttattcggtggaaaggctgttccaggtacaggcaactggcctggcaacttggatacttggaaccttgtatttaaaagtgaatttaaccacaactgagacctaagaaattgacctaggggtgtgtgtgtgtgtgtattctatgtacatataaaccatttttatttcatgcattaaaaatagtatgataaagatttcagagkacaggtctkgkacaatcacagttcattcagctnaacctcctgggtttaaggggcctccgctnagctccaaagtnctgggttacaggcatgggttttcaaa

SEQ ID NO: 31 - DNA, 2033 bp, Homo sapiens
agacggcggtgcgcatgctctgttgcggtccgcttcggtttctgttgcgggacccggggtgtctcctagcgcaaccggaactagccttctgggggccggcttcctttatctctggcggccttgtagtcgtctccgagactccccacccctccttccctcttgaccccctaggtttgattgccctttccccgaaacaactatcatgagcgcgaggctgccggtgttgtctccacctcggtggccgcggctgttgctgctgtcgctgctcctgctgggggcggttcctggcccgcgccggagcggcgctttctacctgcccggcctggcgcccgtcaacttctgcgacgaagaaaaaaagagcgacgagtgcaaggccgaaatagaactatttgtgaacagacttgattcagtggaatcagttcttccttatgaatacacagcgtttgatttttgccaagcatcagaaggaaagcgcccatctgaaaatcttggtcaggtactattcggggaaagaattgaaccttcaccatataagtttacgtttaataagaaggagacctgtaagcttgtttgtacaaaaacataccatacagagaaagctgaagacaaacaaaagttagaattcttgaaaaaaagcatgttattgaattatcaacatcactggattgtggataatatgcctgtaacgtggtgttacgatgttgaagatggtcagaggttctgtaatcctggatttcctattggctgttacattacagataaaggccatgcaaaagatgcctgtgttattagttcagawttccatgaaagagatacattttacatcttcaaccatgttgacatcaaaatatactatcatgttgttgaaactgggtccatgggagcaagattagtggctgctaaacttgaaccgaaaagcttcaaacatacccatatagataaaccagactgctcagggccccccatggacataagtaacaaggcttctggggagataaaaattgcctatacttactctgttagcttcgaggaagatgataagatcagatgggcgtctagatgggactatattctggagtctatgcctcatacccacattcagtggtttagcattatgaattccctggtcattgttctcttcttatctggaatggtagctatgattatgttacggacactgcacaaagatattgctagatataatcagatggactctacggaagatgcccaggaagaatttggctggaaacttgttcatggtgatatattccgtcctccaagaaaagggatgctgctatcagtctttctaggatccgggacacagattttaattatgacctttgtgactctatttttcgcttgcctgggatttttgtcacctgccaaccgaggagcgctgatgacgtgtgctgtggtcctgtgggtgctgctgggcacccctgcaggctatgttgctgccagattctataagtcctttggaggtgagaagtggaaaacaaatgttttattaacatcatttctttgtcctgggattgtatttgctgacttctttataatgaatctgatcctctggggagaaggatcttcagcagctattccttttgggacactggttgccatattggccctttggttctgcatatctgtgcctctgacgtttattggtgcatactttggttttaagaagaatgccattgaacacccagttcgaaccaatcagattccacgtcagattcctgaacagtcgttctacacgaagcccttgcctggtattatcatgggagggattttgccctttggctgcatctttatacaacttttcttcattctgaatagtatttggtcacaccagatgtattacatgtttggcttcctatttctggtgtttatcattttggttattacctgttctgaagcaactatacttctttgctatttccacctatgtgcagaggattatcattggcaatggcgttcattccttacgaggggctttactgcagtttatttcttatctatgcagtacactactt

SEQ ID NO: 32 - DNA, 1456 bp, Homo sapiens
  misc_feature (1451)..(1451): n equals a,t,g, or c
  misc_feature (1454)..(1455): n equals a,t,g, or c
cacgcgtccggccagagtgagtgtttacaccggcggcagtscggccgggttccttccgcgggacgggtgagggcgctggggccctgggcagcgcgggctcgatgtgtgtcagccaagtagctggtcccactggagcgggagaaagagagagcgcgaaagagagaggatgtctctctcagactggcacctggcggtgaagctggctgaccagccacttactccaaagtctattcttcggttgccagagacagaactgggagaatactcgctagggggctatagtatttcatttctgaagcagcttattgctggcaaactccaggagtctgttccagaccctgagctgattgatctgatctactgtggtcggaagctaaaagatgaccagacacttgacttctatggcattcaacctgggtccactgtccatgttctgcgaaagtcctggcctgaacctgatcagaaaccggaacctgtggacaaagtggctgccatgagagagttccgggtgttgcacactgccctgcacagcagctcctcttacagggaggcggtctttaagatgctcagcaataaggagtctctggatcagatcattgtggccaccccaggcctcagcagtgaccctattgctcttggggttctccaggacaaggacctcttctctgtcttcgctgatcccaatatgcttgatacgttggtgcctgctcacccagccctcgtcaatgccattgtcctggttctgcactccgtagcaggcagtgccccaatgcctgggactgactcctcttcccggagcatgccctccagctcataccgggatatgccaggtggcttcctgtttgaagggctctcagatgatgaggatgactttcacccaaacaccaggtccacaccctctagcagtactcccagctcccgcccagcctccctggggtacagtggagctgctgggccccggcccatcacccagagtgagctggccaccgccttggccctggccagcactccggagagcagctctcacacaccgactcctggcacccagggtcattcctcagggacctcaccaatgtcctctggtgtccagtcagggacgcccatcaccaatgatctcttcagccaagccctacagcatgcccttcaggcctctgggcagcccagccttcagagccagtggcagccccagctgcagcagctacgtgacatgggcatccaggacgatgagctgagcctgcgggccctgcaggccaccggtggggacatccaagcagccctggagctcatctttgctggaggagccccatgaactccctgcttcccctgaacccccagcaagttgcagaggctactgcccttgggaggcactcatgaaggtgcctccatctctcccttccccaatatacctgatggtcaactctcaaaaaaaaaaaaaaaaaagggcggccgcntannt

SEQ ID NO: 33 - DNA, 536 bp, Homo sapiens
ccacgcgtccgaaagctgcgtcagaaggttctaacttttgtcatcactattaccagcattgtcatcgttatcgttatcttcgtcatcatcattaccaccgttatacctgatactgccataacaatcagaacattatgtacaggcacggcatatcttcccaaagatcttggccactatggactacgatctttatttttcttggagtggcggcaatcttgggagtaaccattggtcttcttgttcattttctggcagttgagaagacttactattatcaaggtgattttcatatttctggagtcacatacaatgataattgtgaaaacgcagcttcacaagccagcacaaatctaagcaaagatattgagactaagatgttaaatgcatttcaaaattccagtatatataaggaatatgtcaaatctgaggtcatsaaacttctgcctaatgccaatggytcaaatgtgcagttacagctgaaattcaagtttcctccagcagaaggagttagcatgaggactaaaatcaaggctaaa

SEQ ID NO: 34 - DNA, 775 bp, Homo sapiens
  misc_feature (534)..(534): n equals a,t,g, or c
  misc_feature (612)..(612): n equals a,t,g, or c
  misc_feature (696)..(696): n equals a,t,g, or c
  misc_feature (705)..(705): n equals a,t,g, or c
  misc_feature (741)..(741): n equals a,t,g, or c
  misc_feature (775)..(775): n equals a,t,g, or c
gctgttgtccacctttatgctctaacttggaggcagagacccaagcagctggaggctctgtgtgtgggtcgctgatttcttggagcctgaaaagaagcaggagcagcgactggacccagagccatgtggctgtgccctctggccctcamcctcatcttgatggcagcctctggtgctgcgtgcgaagtgaaggacgtttgtgttggaagccctggtatccccggcactcctggatcccacggcctgccaggcagggacgggagagatggtstcaaaggagaccctggccctccaggccccatgggtccgcctggagaaacaccatgtcctcctgggaataatgggctgcctggagcccctggtgtccctggagagcgtggagagaagggggargctggcgagagaggccctccarggcttccagctcatctagatgaggagctccaagccacactccacgacttcagacatcaaatcctgcagacaaggggagccctcagtctgcagggctccataatgacagtaggagagaangtcttctctagcaatgggcagtccatcacttttgatgccattcaggargcatgtgccagagcaagcgggcccaattgntgtcccaaggaattcaagaggaaaatgaggccattgcaagcttctgaaagaaagtcaaccacataattgcctatgtaaggcctnacttaaggntcccaagcccttggaagactttccgttacttaaaantggggaacccctgtaaacttacaccaaacttggn

SEQ ID NO: 35 - DNA, 494 bp, Homo sapiens
cttttggggacgggggctggtgaggctcacgttggagggcttcgcgtctgcttcggagaccgtaaggatattgatgaccatgagatccctgctcagaacccccttcctgtgtggcctgctctgggccttttgtgccccaggcgccagggctgaggagcctgcagccagcttctcccaacccggcagcatgggcctggataagaacacagtgcacgaccaagagcatatcatggagcatctagaaggtgtcatcaacaaaccagaggcggagatgtcgccacaagaattgcagctccattacttcaaaatgcatgattatgatggcaataatttgcttgatggcttaaaactctccacagccatcactcatgtccataaggaggaagggagtgaacaggcaccactaatgaktgaagatgaactgattaacataatagatggygttttgagagatgatgacwagaacaatgatggatacattgactatgctgaat

SEQ ID NO: 36 - DNA, 503 bp, Homo sapiens
ccacgcgtccgagatgctcgtagccagaacagaaaaggttacacatgatcatggcacagaagataggaggtttgacttggtgggccataatgtttattatcctttttgaaataacagggaccagcagcagttttctcaggataaatgctctaccccacttctctatgaacaggtgtggggaggcttactttccattttcatatttatacacctctctacaaaagcaatttttaatgaaggttagtggaattgttaaaaatctgagaggaatgatgactggaggtgtttggggtttttttctgtattcattttttaatgagaaaagttttaaatgtagtacaggttagacccaactactaccttactattataggacgattctatgtttctgttaaagtattcaagtagctttctctgggggaaaaagtaccacttggacacttaaaggaattgggatttttgyctactttggataaggcagktgacttcttaagtaaaagcaa

SEQ ID NO: 37 - DNA, 1115 bp, Homo sapiens
tggcgtgggagctgcctaggccgggccctgccagggagcaagtctgcatcgcagaggccagggcagagtggctcctcacagcctgaagctcatccttctgcacgggccagccaggccagcacagaggcaccagggcagcagtgcacacaggtccccggggaccccaccatgtggagcggatggtggctgtggccccttgtggccgtctgcactgcagacttctttcgggacgaggcagagaggatcatgagggactcccctgtcattgatgggcacaatgacctcccctggcagctgctggatatgttcaacaaccggctgcaggacgagagggccaacctgaccaccttggccggcacacacaccaacatccccaagctgagggccggctttgtgggaggccagttctggtccgtgtacacgccctgcgacacccagaacaaagacgccgtgcggaggacgctggagcagatggacgtggtccaccgcatgtgccggatgtacccggagaccttcctgtatgtcaccagcagtgcaggcattcggcaggccttccgggaagggaaggtggccagcctgatcggcgtggagggcggccactccattgacagcagtttgggcgtcctgcgggcactctatcagctgggcatgcggtacctgaccctcacccacagctgcaacacgccctgggctgacaactggctggtggacacgggagacagcgagccccagagccaaggcttgtcaccytttgggcagcgtgtggtgaaggagctgaaccgtctgggggtcctcatcgacttggctcacgtgtctgtggccaccatgaaggccaccctgcagctgtccagagccccggtcatcttcagccactcctcggcctacagcgtgtgcgcaagccggcgcaacgtgcctgacgacgtcctgaggctggtgaaacagacagacagcctggtgatggtgaacttctacaacaattacatttcctgcaccaacatctcctgagaggacgcctgggcttacctggggggcaggatgcctggggacagttcaggacacacacacagtaggcccgcaataaaagcaacaccccttcaaaaaaaaaaaaaaaaaaa

SEQ ID NO: 38 - DNA, 541 bp, Homo sapiens
ccacgcgtccgatttttttccaaggagaaaaccggggtaaagggagggaagcaattcaatttgaagtccctgtgaatgggctttcagaaggcaattaaagaaatccactcagagaggacttggggtgaaacttgggtcctgtggttttctgattgtaagtggaagcaggtcttgcacacgctgttggcaaatgtcaggaccaggttaagtgactggcagaaaaacttccaggtggaacaagcaacccaggttctgctgcaagcttgaaggagcctggagcgggagaaagctaacttgaacatgacctgttgcatttggcaagttctagcaacatgctcctaaggaagcgatacaggcacagaccatgcagactccagttcctcctgctgctcctgatgctgggatgcgtcctgatgatggtggcgatgttgcaccctccccaccacaccctgcacsagactgtcacagcccaagccagcaagcacagccctgaagccaggtaccgcctggactttggggaatcccaggattgggtactgga

SEQ ID NO: 39 - DNA, 636 bp, Homo sapiens
  misc_feature (482)..(482): n equals a,t,g, or c
  misc_feature (581)..(581): n equals a,t,g, or c
ccacgcgtccgactggagctccgaggagctgcatctgcggcaacctgtgtgctgacgctacgtgcctcctggctccgacgtagctcgcagctccccagtctcactccattccttccccacctggcgcgcacctgctcaagaccagggtcctgccaagcgctaggagggcgcgtgccaggggcgctagggaactgcggagcgcgcgcgccatggggccgccgcctggggccggggtctcctgccgcggtggctgcggcttttccagattgctggcatggtgcttcctgctggccctgagtccgcaggcacccggttcccggggggctgaagcagtgtggaccgcgtacctcaacgtgtcctggcgggttccgcacacgggagtgaaccgtacggtgtgggagctgagcgaggagggcgtgtacggccaggactcgccgctggagcctgtggctggggtcctggtaccgcccgacgggcccggngcgcttaacgcctgtaacccgcacacgaatttcacggtgcccacggtttggggaagcaccgtgcaagtctcttggttggccctcatccaacgcggcggnggctgcaccttcgcagacaagatccatctggcttatgagagaggggcgtctggag

SEQ ID NO: 40 - DNA, 1199 bp, Homo sapiens
aataattctaagtgtccaaaggaagtgatgagtcacttgtgggtagcagtaattgatttccatctaaggcagtgttttgctccttgtgtttgtggattgtgaatgccacaagagtttaaatcttgtcattccagctaattctcactttttaaatacaggaattagaaggtgacgaggagggagaagacgaggatgatgcggaaattaaccccaaggtgtaatttttgtctgttaatcattcatacgtttctagaaggaacccagccagccggcggaatgcaagcagcagtaggaagcggaggcgggtgcctggcagaccggctgtcgggactccaggcctgtgggcggggcctcggtccttgccgcagcacaatcccgtggacagagcttactccatctaactcgttttcaagtgcatgattttcactttcacttttcctttttccttattattttgcttaacttgtacagtggcaactgaaatgcatttcagaaataggaggtttcgtccagcaccctctgcagccttggtgcctgtagctctggacttccctgggcctttccctgtgggagggccctgtagaccacatcagggtggggtgggggtcacttggcaaaaagggccgaggtctggtgatgtggttcccaggatctggaacctctcccacccctcctgcagttggactgaattcttccctttcatccgaagaaamccacttgctgtttccagccgctgaatctgctgagtgtgcagactgcatcacctgctgtatgccgatcatctcagaaagggctgtgtagagtagggccctgttctccttaggatgttgcttcttcatttaaaaaaaaaaggggggggtacaagggattgtgacacaccagcccaggtgacagcttgtgcgggtcaactcataatatatttatcgcttttgactgtgaaggcctgggggatatcacatggggaacagacctataggtatctgaaaccaacttgggtgcctgaacaagaagattgtcaattccatagagggggccaaggccgtgtcggaagaacaggagctcctgtcaccgggttgtaaaaagtgaacgagacattaagagaggcgccaccagtgcgcagagagggttaaggaaatcacccagagaaaaggggggagacacacgagaaagaggacagaatgagaacaggtacaaaacac

SEQ ID NO: 41 - DNA, 393 bp, Homo sapiens
ccacgcgtccggacccaagcagctggaggctctgtgtgtgggtcgctgatttcttggagcctgaaaagaaggagcagcgactggacccagagccatgtggctgtgccctctggccctcaccctcatcttgatggcagcctctggtgctgcgtgcgaagtgaaggacgtttgtgttggaagccctggtatccccggcactcctggatcccacggcctgccaggcagggacgggagagatggtgtcaaaggagaccctggccctccaggccccatgggtccgcctggagaaacaccatgtcctcctgggaataatgggctgcctggagcccctggtgtccctggagagcgtggagagaagggggaggctcgcgagagaggccctccagggcttcc

SEQ ID NO: 42 - DNA, 485 bp, Homo sapiens
ccacgcgtccgctctcagctgctgggacgatcgcccaggctggagctggccccgcttggtggcctgggatctggcacactccctctccttggggtgagggacagagccccacgctgttgacatcagcctgcttcttcccctctgcggctttcactgctgagtttctgttctccctgggaagcctgtgccagcacctttgagccttggcccacactgaggcttaggcctctctgcctgggatgggctcccaccctcccctgaggatggcctggattcacgccctcttgtttccttttgggctcaaagcccttcctacctctggtgatggtttccacaggaacaacagcatctttcaccaagatgggtggcaccaaccttgctgggacttggatcccaggggcttatctcttcaagtgtggagagggcagggtccacgcctctgctgtagcttatgaaattaactaattgaaaattcaaaaaaaaaa

SEQ ID NO: 43 - DNA, 890 bp, Homo sapiens
tcgacccacgcgtccggctccttccccaggtgttcctagtgctgaccttgcagctgtcggtgaccctgtccacggtgtctgtgttcacttttgttgcggaggtgaagggctttgtccgggagaatgtctggacctactatgtctcctatgctgtcttcttcatctctctcatcgtcctcagctgttgtggggacttccggcgaaagcacccctggaaccttgttgcactggtaacccccaaacctgagcctctgtgcctgggtccggccatgcagtcccacacgcccactcttccgggcctggtcaccgtggttctccttgtgctcatgaggcaggggccggcaggggtggcatgggggcacacacccaaggtcagcctgtgtctcccaactgcagtcggtcctgaccgccagcctgtcgtacatggtggggatgatcgccarcttctacaacaccgaggcagtcatcatggccgtgggcatcaccacagccgtctgcttcaccgtcgtcatcttctccatgcagacccgctacgacttcacctcatgcatgggcgtgctcctggtgagcatggtggtgctcttcatcttcgccattctctgcatcttcatccggaaccgcatcctggagatcgtgtacgcctcactgggcgtctgctcttcayctgcgtgwgtgaggggtgaccttggccggggcgggmatgctgggcaggcaggcttgtccctcaacaccactgtgctgtcatctccagttcctcgcagtggacacccagctgctgctgtacagcaagcagctgtccctgagcccagaagagtatgtgtttgctgcgctgaacctgtacacagacatcgtcgacatcttcctgtacatcctcaccatcattggccgcg

SEQ ID NO: 44 - DNA, 1029 bp, Homo sapiens
catgcaggggtggagaagagggcgagagggagagaggataaatagcagcgtggcttccctggctcctctctgcatccttcccgaccttcccagcaatatgcatcttgcacgtctggtcggctcctgctccctccttctgctactgggggccctgtctggatgggcggccagcgatgaccccattgagaaggtcattgaagggatcaaccgagggctgagcaatgcagagagagaggtgggcaaggccctggatggcatcaacagtggaatcacgcatgccggaagggaagtggagaaggttttcaacggacttagcaacatggggagccacaccggcaaggagttggacaaaggcgtccaggggctcaaccacggcatggacaaggttgcccatgagatcaaccatggtattggacaagcaggaaaggaagcagagaagcttggccatggggtcaacaacgctgctggacaggccgggaaggaagcagacaaagcggtccaagggttccacactggggtccaccaggctgggaaggaagcagagaaacttggccaaggggtcaaccatgctgctgaccaggctggaaaggaagtggagaagcttggccaaggtgcccaccatgctgctggccaggccgggaaggagctgcagaatgctcataatggggtcaaccaagccagcaaggaggccaaccagctgctgaatggcaaccatcaaagcggatcttccagccatcaaggaggggccacaaccacgccgttagcctctggggcctcggtcaacacgcctttcatcaaccttcccgccctgtggaggagcgtcgccaacatcatgccctaaactggcatccggccttgctgggagaataatgtcgccgttgtcacatcagctgacatgacctggaggggttgggggtgggggacaggtttctgaaatccctgaagggggttgtactgggatttgtgaataaacttgatacactaaaaaaaaaaaaaaaaaaaaaaaaaaaaaaaaaaagaggagggggg

SEQ ID NO: 45 - DNA, 2560 bp, Homo sapiens
gtccgacggtccacccagtgcttgcggcctcgcggcgggccggctgggctgcaatcaatgcggctttgtctgggacgcccacatcccagaggccattcccgggtcggcaaatcggagcgcggccggggcgcgcggggccttgcccggcagaggactctggaggatgaggaggaacaggagcgcgagcgcaggcggcggcaccgcaacctgagctccaccacggacgatgaggctcccaggctcagccagaatggagaccggcaggcctctgcttctgagagactaccgagcgtggaagaagcagaggtgcccaagccactgcccccagcctccaaagatgaggacgaggacatccagagcatcctcagaacacggcaggagcggaggcagaggcggcaggtggtggaggctgcacaggcccccatccaggagaggctggaggcagaggaggggaggaacagcttgagccctgtgcaggccacacagaaacccctagtctccaagaaggaactggaaatcccacctcgccggagactgagtcgggaacagcggggcccctgggccctggaggaggagagcttggtgggcagggagccagaagagaggaagaaaggggttccagaaaagtccccagtcttggagaartcctccatgccaaagaagacggcacctgaaaagagcctggtctccgataaaacctccatctctgagaaggtgctggcctcagagaagacatctctatcagagaagatagcagtgtcagagaaaagaaacagctcagagaagaagtctgttctagaaaaaaccagtgtctctgagaagtcgctggccccagggatggcactgggctcaggaaggaggctggtgtctgagaaagcttccatctttgagaaggcactggcctcagagaagagcccaactgcagatgctaagccggccccaaagagggccacagcctcagagcagcccctggcgcaggagccgccagcctctgggggaagcccagccaccaccaaggagcagagaggaagggccctccctgggaagaacctgccctctttggcaaagcagggggcttcagaccctccgactgtggcctcccgcctcccacccgtcacactccaggtgaaaatccccagcaaggaggaagaggcagatatgtcctcacccacacagcgaacctacagcagctccctcaaacgctccagccccaggaccatctcctttcggatgaaacccaagaaagaaaactcggaaacaaccctaactcgcagtgccagcatgaagctcccagacaacacagtgaagttgggagagaagctggagagataccacacggccatacggagatcagaatctgtcaagtctcggggtctgccttgcactgagttattcgtggctcctgtgggtgtagccagcaagcgccacctctttgagaaggaactggcgggccagagccgagcagaaccagcctccagccggaaggagaacttgaggctctcaggggttgtgacatcaaggctcaacctgtggatcagcaggacccaggaatctggagatcaggacccccaggaggcacagaaagcatcatctgcaaccgagaggactcagtggggacagaaatctgactcctcgctggacgctgaggtgtgacaagccccgccaagacagacctgcaagtcttcgtctcaagggacctccctcatgccaggcccctgcctctcacagcagcaccctttcctctcattgtccctgttccctttttgcctgtggatctgtttggccagggtccctggggtcaggaatatttgcaagactcagccagctccttcccagcccagcctcttggggctgggactttctcaccctgcggcaggcacaacagatgctgggacccagtctctgcccaggtcacagcacaagtgcacatcagcactatggggcctatgtcctgcccagagacctctgctccttcctgctcacatccacagtcagggcacggcgcccctcaagaactccagagtcacctgtctcatcggctcccagcaagtgcctctttgtctatgatgtcccccttctctgaggcctggacccacccatctttgtccctggggcctgctcccagccactgaggcccgctctggccaggggagaaggagctgccgtgcgtcttccctgtgccccgtctccctgcttggttctcccctcccttccctggccggctgccatggccaggagctaagtgcctttttgtgtgcaaccacttaccctttctctgaaaaacctgttctcaggaaggatctgataaactcatttactctcaggtgwaagagactgatgagaccttagaagcgaattcctctctggaggccttgctttctagcagaggtcacctgaagtgtgtgaggaggatcatcattttcctcatcccccctcttctcacattaaggtggtggcttgccactcagcagtcctagcttggtgactgggaactgccacatacagggccaggcctaccctccttccccaaagccccctccaacccccacccccatgctct

SEQ ID NO: 46 - DNA, 342 bp, Homo sapiens
atatcgtcgacccacgcgtccgagaacatgcagctcggcactgggctcctgctggccgccgtcctgagcctgcagctggctgcagccgaagccatatggtgtcaccagtgcacgggcttcggagggtgctcccatggatccagatgcctgagggactccacccactgtgtcaccactgccacccgggtcctcagcaacaccgaggatttgcctctggtcaccaagatgtgccacataggctgccccgatatccccagcctgggcctgggcccctacgtatccatcgcttgctgccagaacaacctctgcaaccatgactgacgggtgccctcctccaggccc

SEQ ID NO: 47 - DNA, 499 bp, Homo sapiens
ccacgcgtccggacccaagcagctggaggctctgtgtgtggcctggagaccccacaacctccagccggaggcctgaagcatgaggccatgccaggtgccaggagcagcgactggacccagagccatgtggctgtgccctctggccctcaacctcatcttgatggcagcctctggtgctgtgtgcgaagtgaaggacgtttgtgttggaagccctggtatccccggcactcctggatcccatggcctgccaggcagggacgggagagatggtctcaaaggagaccctggccctccaggccccatgggtccacctggagaaatgccatgtcctcctggaaatgatgggctgcctggagcccctggtatccctggagagtgtggagagaagggggagcctggcgagaggggccctccagggcttccagctcatctagatgargagctycaagccacactycacgactttagacatcaaatcctgcagacaaggggagccctc

SEQ ID NO: 48 - DNA, 538 bp, Homo sapiens
  misc_feature (428)..(428): n equals a,t,g, or c
  misc_feature (491)..(491): n equals a,t,g, or c
ccacgcgtccgcctcgctcatcatgctgaaccgctacttcagcaagcggcgccccatggccaacgggctggcggcagcaggtagccctgtcttcctgtgtgccctgagcccgctggggcagctgctgcaggaccgctacggctggcggggcggcttcctcatcctgggcggcctgctgctcaactgctgcgtgtgtgccgcactcatgaggcccctggtggtcacggcccagccgggctcggggccgccgcgaccctcccggcgcctgctagacctgagcgtcttccggcaccgcggctttgtgctttacgccgtggccgcctcggtcatggtgctggggctcttcgtcccgcccgtgttcgtggtgagctacgccaaggacctgggcgtgcccgacaccaaggccgccttcctgctcaccatcctgngcttcattgacatcttcgcgcggccggccgcgggcttcgtggcggggcttgggaaggtgcggncctactccgtctacctcttcagcttctccatgttcttcaacggcctc

SEQ ID NO: 49 - DNA, 1417 bp, Homo sapiens
  misc_feature (1403)..(1403): n equals a,t,g, or c
  misc_feature (1406)..(1407): n equals a,t,g, or c
  misc_feature (1409)..(1412): n equals a,t,g, or c
  misc_feature (1414)..(1415): n equals a,t,g, or c
gcccacgcgtccgcccacgcgtccggtgcgggtttcggttggaggactcgttggggaggtggcctgcgcttgtagagactgcatccccgagacgatggcggagggagataatcgcagcaccaacctgctggctgcagagactgcaagtctggaagaacagctgcaaggatggggagaagtgatgctgatggctgataaagtcctccgatgggaaagagcctggtttccacctgccatcatgggtgtggtttctttggtgtttctgattatctactatctagatccatctgttctgtccggcgtttcctgttttgttatgtttttgtgcttggctgactaccttgttcccattctagcgcctagaatttttggctccaataaatggaccactgaacaacagcaaagattccatgaaatttgcagcaatctagtaaaaactcgacgcagagctgtgggttggtggaaacgcctcttcacactaaaggaagaaaaacctaagatgtacttcatgaccatgatcgtttcccttgctgcggttgcttgggtgggacaacaagtccacaacctgcttctcacctacctgatagtgacttccttactattgcttcctggactaaaccaacatggaatcattttgaagtacattggaatggccaagagggagataaacaaacttctcaaacaaaaagaaaagaaaaacgaatgattcatctgctttaatcagtgtgattaatgcagcacccattgccccgggaaccgtttctgctgtactatctggatactaaaatgttacggaagtagctctttgttctccctcactctgcccttagttaatagaaattcagactcgccaagtaaggcttcgtgcatagtgtcttcatgtcgcgtatagttgagcgcgttcttagcagttggcttcatggacaactcattagtgttttgacttttcttacccagcgttaattgaattcttgcttttagacaacttcctttttgtagtggtgaaccttgccctttagtacagttcaagtgaatctggataattgttcatctttgctttagcttagataccatgtagtggtctgtggctacaggaagctggttctgtctgcttccacagtctgcttaaaaaactgtctgacttcgtgaatatagagaccaagtwtaccacaactsatgawcgcaccagcaacaaactttaaccaattccaatttccatcgagattcctgaaaacattatacccagtgggcggacgaacaggaggttcaccagattgaacataacggacttggaccagtcgagttacctatatgacacataagctaaccactgtacacagatctcatcccctatgtgccatataccgtatttcaccacatctcggtaggcacaccattgcatntanntnnnngnnta

SEQ ID NO: 50 - DNA, 1127 bp, Homo sapiens
cacaacatcccatctttgtgtttcgatacagactaagcttttaggccaaccctcctgactggatgggggcggcgggcgtggcatgcatgaaaagtaaacatcagagacctgaagaagcttataaaatagcttgggagaggccagtcaccaagacaggcatctcaaatcggctgattctgcatctggaaactgccttcatcttgaaagaaaagctccaggtcccttctccagccacccagccccaagatggtgatgctgctgctgctgctttccgcactggctggcctcttcggtgcggcagagggacaagcatttcatcttgggaagtgccccaatcctccggtgcaggagaattttgacgtgaataagtatctcggaagatggtacgaaattgagaagatcccaacaacctttgagaatggacgctgcatccaggccaactactcactaatggaaaacggaaagatcaaagtgttaaaccaggagttgagagctgatggaactgtgaatcaaatcgaaggtgaagccaccccagttaacctcacagagcctgccaagctggaagttaagttttcctggtttatgccatcggcaccgtactggatcctggccaccgactatgagaactatgccctcgtgtattcctgtacctgcatcatccaactttttcacgtggattttgcttggatcttggcaagaaaccctaatctccctccagaaacagtggactctctaaaaaatatcctgacttctaataacattgatgtcaagaaaatgacggtcacagaccaggtgaactgccccaagctctcgtaaccaggttctacagggaggctgcacccactccatgttacttctgcttcgctttcccctaccccaccccccsccataaagacaaaccaatcaaccacgacaaaggaagttgacctaaacatgtaaccatgccctaccctgttaccttgctagctgcaaaatggtgggccgcgtaccgcggaatcaaacaaaaagggggcgcgtccgggccaccgccagttgactgccacggctacggagggtcagagggaaccgatggactgggcagacaacgaatagcgatggcgtgtaaaaacagacgcgtcaggactctt

SEQ ID NO: 51 - DNA, 843 bp, Homo sapiens
acccacgcgtccgacgaaagcagtgtcaagacagtaaggattcaaaccatttgccaaaaatgagtctaagtgcatttactctcttcctggcattgattggtggtaccagtggccagtactatgattatgattttcccctatcaatttatgggcaatcatcaccaaactgtgcaccagaatgtaactgccctgaaagctacccaagtgccatgtactgtgatgagctgaaattgaaaagtgtaccaatggtgcctcctggaatcaagtatctttaccttaggaataaccagattgaccatattgatgaaaaggcctttgagaatgtaactgatctgcagtggctcattctagatcacaaccttctagaaaactccaagataaaagggagagttttctctaaattgaaacaactgaagaagctgcatataaaccacaacaacctgacagagtctgtgggcccacttcccaaatctctggaggatctgcagcttactcataacaagatcacaaagctgggctcttttgaaggattggtaaacctgaccttcatccatctccagcacaatcggctgaaagaggatgctgtttcagctgcttttaaaggtcttaaatcactcgaataccttgacttgagcttcaatcagatagccagactgccttctggtctccctgtctctcttctaactctctacttagacaacaataagatcagcaacatccctgatgagtatttcaagcgttttaatgcattgcagtatctgcgtttatctcacaacgaactggctgatagtggaatacctggaaattctttcaatgtgtcatccctggttgagctggatctgt

SEQ ID NO: 52 - DNA, 409 bp, Homo sapiens
ccacgcgtccggtttgtatttatattgaatgcatcccttccttaccatatgttagcaacctgtgcagaagccctacccagacctaactgggaactggctctgtatatcatcatctcaggaataatgagtgcactgtttcttttggtcattggaacagcctatttggaagctcaaggaatatgggagccatttcgaaggcggctatcctttgaggcctcgaacccgcccttcgatgtgggaaggccatttgatctcaggagaatcgttggtatttcatctgaaggaaastatgttcacatgctggcaataaattccctagtgtacatagatttggctgataaaattacaataaaaaataagtttcttttcaaaaaaraaaaaaaaaaaaaaaaaaaaaaaaaaaaaaagg

SEQ ID NO: 53 - DNA, 2351 bp, Homo sapiens
gtccgacggtccacccagtgcttgcggcctcgcggcgggccggctgggctgcaatcaatgcggctttgtctgggacgcccacatcccagaggccattcccgggtcggcaaatcggagcgcggccggggcgcgcggggccttgcccggcagaggactctggaggatgaggaggaacaggagcgcgagcgcaggcggcggcaccgcaacctgagctccaccacggacgatgaggctcccaggctcagccagaatggagaccggcaggcctctgcttctgagagactaccgagcgtggaagaagcagaggtgcccaagccactgcccccagcctccaaagatgaggacgaggacatccagagcatcctcagaacacggcaggagcggaggcagaggcggcaggtggtggaggctgcacaggcccccatccaggagaggctggaggcagaggaggggaggaacagcttgagccctgtgcaggccacacagaaacccctagtctccaagaaggaactggaaatcccacctcgccggagactgagtcgggaacagcggggcccctgggccctggaggaggagagcttggtgggcagggagccagaagagaggaagaaaggggttccagaaaagtccccagtcttggagaartcctccatgccaaagaagacggcacctgaaaagagcctggtctccgataaaacctccatctctgagaaggtgctggcctcagagaagacatctctatcagagaagatagcagtgtcagagaaaagaaacagctcagagaagaagtctgttctagaaaaaaccagtgtctctgagaagtcgctggccccagggatggcactgggctcaggaaggaggctggtgtctgagaaagcttccatctttgagaaggcactggcctcagagaagagcccaactgcagatgctaagccggccccaaagagggccacagcctcagagcagcccctggcgcaggagccgccagcctctgggggaagcccagccaccaccaaggagcagagaggaagggccctccctgggaagaacctgccctctttggcaaagcagggggcttcagaccctccgactgtggcctcccgcctcccacccgtcacactccaggtgaaaatccccagcaaggaggaagaggcagatatgtcctcacccacacagcgaacctacagcagctccctcaaacgctccagccccaggaccatctcctttcggatgaaacccaagaaagaaaactcggaaacaaccctaactcgcagtgccagcatgaagctcccagacaacacagtgaagttgggagagaagctggagagataccacacggccatacggagatcagaatctgtcaagtctcggggtctgccttgcactgagttattcgtggctcctgtgggtgtagccagcaagcgccacctctttgagaaggaactggcgggccagagccgagcagaaccagcctccagccggaaggagaacttgaggctctcaggggttgtgacatcaaggctcaacctgtggatcagcaggacccaggaatctggagatcaggacccccaggaggcacagaaagcatcatctgcaaccgagaggactcagtggggacagaaatctgactcctcgctggacgctgaggtgtgacaagccccgccaagacagacctgcaagtcttcgtctcaagggacctccctcatgccaggcccctgcctctcacagcagcaccctttcctctcattgtccctgttccctttttgcctgtggatctgtttggccagggtccctggggtcaggaatatttgcaagactcagccagctccttcccagcccagcctcttggggctgggactttctcaccctgcggcaggcacaacagatgctgggacccagtctctgcccaggtcacagcacaagtgcacatcagcactatggggcctatgtcctgcccagagacctctgctccttcctgctcacatccacagtcagggcacggcgcccctcaagaactccagagtcacctgtctcatcggctcccagcaagtgcctctttgtctatgatgtcccccttctctgaggcctggacccacccatctttgtccctggggcctgctcccagccactgaggcccgctctggccaggggagaaggagctgccgtgcgtcttccctgtgccccgtctccctgcttggttctmccctcccttccctggccggctgcatggccaggagctaaagtgccttttagtgtgcaaccacttacctttctctgaaaaactgtactcaggaaggatctgataactcattactctcaaagaacaacacaaaaaaaaacaaaaaaaaaaa

SEQ ID NO: 54 - DNA, 1313 bp, Homo sapiens
  misc_feature (1211)..(1211): n equals a,t,g, or c
tcgacccacgcgtccgagcagacacaatggtaagaatggtgcctgtcctgctgtctctgctgctgcttctgggtcctgctgtcccccaggagaaccaagatggtcgttactctctgacctatatctacactgggctgtccaagcatgttgaagacgtccccgcgtttcaggcccttggctcactcaatgacctccagttctttagatacaacagtaaagacaggaagtctcagcccatgggactctggagacaggtggaaggaatggaggattggaagcaggacagccaacttcagaaggccagggaggacatctttatggagaccctgaaagacatygtggagtattacaacgacagtaacgggtctcacgtattgcagggaaggtttggttgtgagatcgagaataacagaagcagcggagcattctggaaatattactatgatggaaaggactacattgaattcaacaaagaaatcccagcctgggtccccttcgacccagcagcccagataaccaagcagaagtgggaggcagaaccagtctacgtgcagcgggccaaggcttacctggaggaggagtgccctgcgactctgcggaaatacctgaaatacagcaaaaatatcctggaccggcaagatcctccctctgtggtggtcaccagccaccaggccccaggagaaaagaagaaactgaagtgcctggcctacgacttctacccagggaaaattgatgtgcactggactcgggccggcgaggtgcaggagcctgagttacggggagatgttcttcacaatggaaatggcacttaccagtcctgggtggtggtggcagtgcccccgcaggacacagccccctactcctgccacgtgcagcacagcagcctggcccagcccctcgtggtgccctgggaggccagctaggaagcaagggttggaggcaatgtgggatctcagacccagtagctgcccttcctgcctgatgtgggagctgaaccacagaaatcacagtcaatggatccacaaggcctgaggagcagtgtggggggacagacaggaggtggatttggagaccgaagactgggatgcctgtcttgagtagacttggacccaaaaaatcatctcaccttgagcccacccccaccccattgtctaatctgtagaagctaataaataatcatccctccttgcctagcawaaaaaaagtcgttnacaattactggccggcgtttacaacgtcggactgggaacccctgcgtacccactaatcgccttgagacatcccctttgcagctgcgtatagcgaggcgcacc

SEQ ID NO: 55 - DNA, 1948 bp, Homo sapiens
gcaggttgagatgtgtataagagacaggaagatacgtcacaaaagccttagcctgggtgaagtgctggatggggaccgaatggctgagtctttgtatgagatccgctttcgggaaaacgtggagaagagaattctgtgccacatgcagctcagttctgcacaggtggagcagctgcgccaggccattgaagaactgtactactttgaatttgtggtagatgacttgccaatccggggctttgtgggctacatggaggagagtggtttcctgccacacagccacaagataggactctggacccatttggacttccacctagaattccatggagaccgaattatatttgccaatgtttcagtgcgggacgtcaagccccacagcttggatgggttacgacctgacgagttcctaggccttacccacacttatagcgtgcgctggtctgagacttcagtggagcgtcggagtgacaggcgccgtggtgacgatggtggtttctttcctcgaacactggaaatccattggttgtccatcatcaactccatggtgcttgtgtttttactggtgggttttgtggctgtcattctaatgcgtgtgcttcggaatgacctggctcggtacaacttagatgaggagaccacctctgcaggttctggtgatgactttgaccagggtgacaatggctggaaaattatccatacagatgtcttccgcttccccccataccgtggtctgctctgtgctgtgcttggcgtgggtgcccagttcctggcccttggcactggcattattgtcatggcactgctgggcatgttcaatgtgcaccgtcatggggccattaactcagcagccatcttgttgtatgccctgacctgctgcatctctggctacgtgtccagccacttctaccggcagattggaggcgagcgttgggtgtggaacatcattctcaccaccagtctcttctctgtgcctttcttcctgacgtggagtgtggtgaactcagtgcattgggccaatggttcgacacaggctctgccagccacaaccatcctgctgcttctgacggtttggctgctggtgggctttcccctcactgtcattggaggcatctttgggaagaacaacgccagcccctttgatgcaccctgtcgcaccaagaacatcgcccgggagattccaccccagccctggtacaagtctactgtcatccacatgactgttggaggcttcctgcctttcagtgccatctctgtggagctgtactacatctttgccacagtatggggtcgggagcagtacactttgtacggcatcctcttctttgtcttcgccatcctgctgagtgtgggggcttgcatctccattgcactcacctacttccagttgtctggggaggattaccgctggtggtggcgatctgtgctgagtgttggctccaccggcctcttcatcttcctctactcagttttctattatgcccggcgctccaacatgtctggggcagtacagacagtagagttcttcggctactccttactcactggttatgtcttcttcctcatgctgggcaccatctcctttttttcttccctaaagttcatccggtatatctatgttaacctcaagatggactgagttctgtatggcagaactattgctgttctctccctttcttcatgccctgttgaactctcctaccagcttctcttctgattgactgaattgtgtgatggcattgttgccttcccttttgccctttgggcattccttccccagagagggcctggaaattataaatctctatcacataaggattatatatttgaactttttaagttgcctttagttttggtcctgatttttctttttacaattaccaaaataaaatttattaagaaaaagaaaaaaaaaaaaaaaaaaaaaaggggsggaraactccgggcg

SEQ ID NO: 56 - DNA, 258 bp, Homo sapiens
ccacgcgtccgcggacgcgtgggtgccgctgccaccgcaccccgccatggagcggccgtcgctgcgcgccctgctcctcggcgccgctgggctgctgctcctgctcctgcccctctcctcttcctcctcttcggacacctgcggcccctgcgagccggcctcctgcccgcccctgcccccgctgggctgcctgctgggcgagacccgcgacgcgtgcggctgctgccctatgtgcgcccgcggcgagggcgagccgtg

SEQ ID NO: 57 - DNA, 498 bp, Homo sapiens
acatgtttggcttcctatttctggtgtttatcattttggttattacctgttctgaagcaactatacttctttgctatttccacctatgtgcagaggattatcattggcaatggcgttcattccttaccagtggctttactgcagtttatttcttaatctatgcagtacactacttcttttcaaaactgcagatcacgggaacagcaagcacaattctgtactttggttataccatgataatggttttgatcttctttctttttacaggaacaattggcttctttgcatgcttttggtttgttaccaaaatatacagtgtggtgaaggttgactgaagaagtccagtgtgtccagttaaaacagaaataaattaaactcttcatcaacaaagacctgyttttgtgactgccttgagttttatcagaattattggcctagtaatccttcagaaacaccgtaattctaaataaacctcttcccatacacctttcccccata

SEQ ID NO: 58 - DNA, 385 bp, Homo sapiens
gaccatgataaggacgctgctgctgtccactttggtggctggagccctcagttgtggggaccccacttacccaccttatgtgactagggtggttggcggtgaagaagcgaggcccaacagctggccctggcaggtctccctgcagtacagctccaatggcaagtggtaccacacctgcggagggtccctgatagccaacagctgggtcctgacggctgcccactgcatcagctcctccaggacctaccgcgtggggctgggccggcacaacctctacgttgcggagtccggctcgctggcagtcagtgtctctaagattgtggtgcacaaggactggaactccaaccaaatctccaaagggaatgacattgccctgctcaaactg

SEQ ID NO: 59 - DNA, 627 bp, Homo sapiens
taggccaggagttcgatatgacttcagaattatgggttatctacaaaaaggttgcttgtttattagagaaaaaaacaggatactctcaggaacttgctccttcagacaaccctcacgtgctggtggatacattgacatcccactccttcactctgagttggaaagattactctactgaatctcaacctggttttatacaagggtaccatgtctatctgaaatccaaggcgaggcagtgccacccacgatttgaaaaggcagttctttcagatggttcagaatgttgcaaatacaaaattgacaacccggaagaaaaggcattgattgtggacaacctaaagccagaatccttctatgagtttttcatcactccattcactagtgctggtgaaggccccagtgctacgttcacgaaggtcacgactccggatgaacactcctcgatgctgattcatatcctactgcccatggttttctgcgtcttgctcatcatggtcatgtgctacttgaaaagtcagtggatcaaggagacctgttatcctgacatccctgacccttacaagagcagcatcctgtcattaataaaattcaaggtaaatgttgaaaaaaaaaaaaaaaaaaaaaaag

SEQ ID NO: 60 - DNA, 887 bp, Homo sapiens
ctccaagcagacacaatggtaagaatggtgcctgtcctgctgtctctgctgctgcttctgggtcctgctgtcccccaggagaaccaagatggtcgttactctctgacctatatctacactgggctgtccaagcatgttgaagacgtccccgcgtttcaggcccttggctcactcaatgacctccagttctttagatacaacagtaaagacaggaagtctcagcccatgggactctggagacaggtggaaggaatggaggattggaagcaggacagccaacttcagaaggccagggaggacatctttatggagaccctgaaagacatygtggagtattacaacgacagtaacgggtctcacgtattgcagggaaggtttggttgtgagatcgagaataacagaagcagcggagcattctggaaatattactatgatggaaaggactacattgaattcaacaaagaaatcccagcctgggtccccttcgacccagcagccccctactcctgccacgtgcagcacagcagcctggcccagcccctcgtggtgccctgggaggccagctaggaagcaagggttggaggcaatgtgggatctcagacccagtagctgcccttcctgcctgatgtgggagctgaaccacagaaatcacagtcaatggatccacaaggcctgaggagcagtgtggggggacagacaggaggtggatttggagaccgaagactgggatgcctgtcttgagtagacttggacccaaaaaatcatctcaccttgagcccacccccaccccattgtctaatctgtagaagctaataaataatcatccctccttgcctagcaraaaaaaaaaaaaaaaaaaaaaaaaaaaaaaaaaaaaaaaaagggaa

SEQ ID NO: 61 - DNA, 1141 bp, Homo sapiens
  misc_feature (825)..(825): n equals a,t,g, or c
ggaaccggccagctcctgctctgtcccctcaggtgtcctgcaggcacagcatctcggggggcccaggccgatggcaggtcttaacgtgtccctctccttcttctttgccaccttcaccctctgtgaggcagccaggcgggcctccaaggccctgctcccagtgggcgcctatgaagtcttcgcccgggaggcggtgggygcggtgcagctcggggcctgctkcctggagatgaggacgctggtcgagctcgggccctgggctggggactttgggcctgacctgctgctcaccctgctcttcctgctcttcctggcgcacggggtcaccttggacggggcctcggccaaccccacygtgtccctgcaggagttcctcatggccgagsagtctctgcctggcacgctgytgaagctggcggcacaggggctgggcatgcaggccgcctgcaccctgaygcgcctctgctgggcctgggagctcagtgacctgcacctgctgcagagcctcatggcccagagctgcagctcggccctgcgcacatccgtgccccacggggcgcttktggaggccgcctgcaccttttgtttccatctgaccctcctgcacctgcggcacagtcctcccgcctacagcgggccygctgtggctctgttggtcaccgtcayggcctacacggccggcccttacgtctgcttcttcaaccctgccctggccgctctgtgacctttgcctgctcgggacacaccttactggagtacgtgcaggtgtactggctgggccctctgacagggatggtcctggctgtgctgctgcaccagggccgncttccccrccttttccagaggaacctgttctacggccagaagaacaagtaccgagcaccccgagggaagccggccccggcctcaggggacacccagacccctgcaaaggggtccagtgtccgggagcctgggcgcagtggtgttgaggggccacattccagctgagtggccttgctctgtgtgagccccgtgcgagggccctgcttgtagctggaccctggaaccttctgtagctaagagggaatcctggccccctccccagaagccatttgtcaataaaccatttctaagaaaaaaaaaaaaaaagggcggccgc

SEQ ID NO: 62 - DNA, 1187 bp, Homo sapiens
gcgagcgccgcacatgcgccggggtcgggccgggccgggccgggccgggggcgcgcgctctgcgagctggatgtccaggctgcgggcgctgctgggcctcgggctgctggttgcgggctcgcgcctgccgcggatcaaaagccagaccatcgcctgtcgctcgggacccacctggtggggaccgcagcggctgaactcgggtggccgctgggactcagaggtcatggcgagcacggtggtgaagtacctgagccaggaggaggcccaggccgtggaccaggagctatttaacgaataccagttcagcgtggaccaacttatggaactggccgggctgagctgtgctacagccatcgccaaggcatatccccccacgtccatgtccaggagcccccctactgtcctggtcatctgtggcccggggaataatggaggagatggtctggtctgtgctcgacacctcaaactctttggctacgagccaaccatctattaccccaaaaggcctaacaagcccctcttcactgcattggtgacccagtgtcagaaaatggacatccctttccttggggaaatgcccgcagagcccatgacgattgatgaactgtatgagctggtggtggatgccatctttggcttcagcttcaagggcgatgttcgggaaccgttccacagcatcctgagtgtcctgaagggactcactgtgcccattgccagcatcgacattccctcaggatgggacgtggagaagggaaatgctggagggatccagccagacttgctcatctccctcacagcccccaaaaaatctgcaacccagtttaccggtcgctaccattacctggggggtcgttttgtgccacctgctctggaaaagaagtaccagctgaacctgccaccctaccctgacactgagtgtgtctatcgtctgcagtgagggaaggtgggtgggtattctccccaataaagacttagagcccctctcttccagaactgtggattcctgggagctcctctggcaataaaagtcagtgaatggtggaagtcagagagcaaccctggggattgggtgccatctctctaggggtaacacaaagggcaagaggttgctatggtatttggaaacaatgaaaatggactgttagatgccaaaaaaaaaaaaaaaaaaaaaaaaaaaaaaaactcga

SEQ ID NO: 63 - DNA, 425 bp, Homo sapiens
  misc_feature (417)..(418): n equals a,t,g, or c
cccacgcgtccgcccacgcgtccggtcccactcrccatggagaagatcctgatcctcctgcttgtcgccctctctgtggcctatgcagctcctggcccccgggggatcattatcaacctgacgctctatgggatttactacaagtgtccctgtgagcgtggcctgacctgtgagggagacaagaccatcgtgggctccatcaccaacaccaactttggcatctgccatgacgctggacgctccaagcagtgagactgcccacccactcccacacctagcccagaatgctgtaggccactaggcgcaggggcatctctcccctgctccagcgcatctcccgggctggccacctccttgaccagcatatctgttttctgattgcgctcttcacaattaaaggcctcctgcamaccttannaaaaaaa

SEQ ID NO: 64 - DNA, 536 bp, Homo sapiens
caccagctgtcccactcaccatggagaagatcctgatcctcctgcttgtcgccctctctgtggcctatgcagctcctggcccccgggggatcattatcaacctggagaacggtgagctctgcatgaatagtgcccagtgtaagagcaattgctgccagcattcaagtgcgctgggcctggcccgctgcacatccatggccagcgagaacagcgagtgctctgtcaagacgctctatgggatttactacaagtgtccctgtgagcgtggcctgacctgtgagggagacaagaccatcgtgggctccatcaccaacaccaactttggcatctgccatgacgctggacgctccaagcagtgagactgcccacccactcccacacctagcccagaatgctgtaggccactaggcgcaggggcatctctcccctgctccagcgcatctcccgggctggccacctccttgaccagcatatctgttttctgattgcgctcttcacaattaaaggcctcctgcaaaccttaaaaaaaaaaaaaa

SEQ ID NO: 65 - DNA, 725 bp, Homo sapiens
  misc_feature (680)..(680): n equals a,t,g, or c
ccacgcgtccgcccacgcgtccgcccacgcgtccgggcccgtagaagattccagcaccctcccctaactccaggccagactcctttcagctaaaggggagatctggatggcatctacttcgtatgactattgcagagtgcccatggaagacggggataagcgctgtaagcttctgctggggataggaattctggtgctcctgatcatcgtgattctgggggtgcccttgattatcttcaccatcaaggccaacagcgaggcctgccgggacggccttcgggcagtgatggagtgtcgcaatgtcacccatctcctgcaacaagagctgaccgaggcccagaagggctttcaggatgtggaggcccaggccgccacctgcaaccacactgtgatggccctaatggcttccctggatgcagagaaggcccaaggacaaaagaaagtggaggagcttgagggagagatcactacattaaaccataagcttcaggacgcgtctgcagaggtggagcgactgagaagagaaaaccaggtcttaagcgtgagaatcgcggacaagaagtactaccccagctcccaggactccagctccgctgcggcgccccagctgctgattgtgctgctgggcctcagcgctctgctgcagtgagatcccaggaagctggcacatcttggaaggnccgtcctgctcggcttttcgctgaacattcccttgatctcatcag

SEQ ID NO: 66 - DNA, 467 bp, Homo sapiens
  misc_feature (418)..(418): n equals a,t,g, or c
gccgatggcaggtcttaacgtgtccctctccttcttctttgccaccttcgccctctgtgaggcagccaggcgggcctccaaggccctgctcccagtgggcgcctatgaagtcttcgcccgggaggcggtgggcgcggtgcagctcggggcctgcttcctggagatgaggacgctggtcgagctcgggccctgggctggggactttgggcctgacctgctgctcascctgctcttcctgctcttcctggcgcacggggtcaccttggacggggcctcggccaaccccaccgtgtccctgcaggagttcctcatggccgaggagtctctgcctggcacgctgctgaagctggcggcacaggggctgggcatgcaggccgcctgcaccctgaygcrcctctgctggscctgggagctcagngacctgcacctgctgcagagcctcatggcccagagctgcagctcggccc

SEQ ID NO: 67 - DNA, 690 bp, Homo sapiens
  misc_feature (668)..(668): n equals a,t,g, or c
  misc_feature (677)..(677): n equals a,t,g, or c
  misc_feature (687)..(687): n equals a,t,g, or c
  misc_feature (689)..(689): n equals a,t,g, or c
gactccctatagggaaagctggtacgctgcaaggtccggtccgaattcccgsgtcgcccacgcgtccgagcaactccagagcctccttcaagatgctgctggtcctgctctcagtggtccttctggctctgagctcagctcagagcacagataatgatgtgaactatgaagactttactttcaccataccagatgtagaggactcaagtcagagaccagatcagggaccccagagacctcctcctgaaggactcctacctagaccccctggtgatagtggtaaccaagatgatggtcctcagcagagaccaccaaaaccaggaggccatcaccgccatcctcccccacctccttttcaaaatcagcaacgaccaccccaacgaggacaccgtcaactctctctaccccgatttccttctgtcagcctgcaggaagcatcatcattcttccggagggacagaccagcaagacatccccaggagcaaccactctggtaatctagaattcagtggcagaaaataaataagaagataacttccttcagaaagccatgacattgaaataatgtggtcataactctttcttcagtataccaataaaatattaatagcatgcaaaaaaaaaaaaaaagsggccgttttaraggatccaagyttacgaccygggcnttgggtgcnaaatcataantng

SEQ ID NO: 68 - DNA, 937 bp, Homo sapiens
ccacgcgtccggactagttctagagccgagccggccgcgctccgaacggcgcctcccgccccaccatgggcaacagcgcgagccgcarcgacttcgagtgggtctacaccgaccagccgcacacgcagcggcgcaaggagatactggccaagtacccggccatcaaggccctgatgcggccagacccgcgcctcaagtgggcggtgctggtgctggtgctggtgcagatgctggcctgctggctggtgcgcgggctggcctggcgctggctgctgttctgggcctacgcctttggtggctgcgtgaaccactcgctgacgctggccatccacgacatctcgcacaacgcggccttcggcacgggccgtgcggcacgcaaccgctggctggccgtgttcgccaacctgcccgtgggtgtgccctacgccgcctccttcaagaagtaccacgtggaccaccaccgctacctgggcggcgacgggctggacgtggacgtgcccacgcgtctggagggctggttcttctgcacgcccgcccgcaagctgctctggctggtgctgcagcccttcttctactcactacggccgctctgcgtccaccccaaggccgtgacccgcatggaggtgctcaacacgctggtgcagctggcggccgacctggccatctttgccctttgggggctcaagcccgtggtctacctgctggccagctccttcctgggcctgggcctgcaccccatctcgggccacttcgtggccgagcactacatgttcctcaagggccacgagamctactcctactatgggcctctcaactggatcaccttcaatgtgggctacacgtggarcamcacgacttycccagcaatcccgggctacaacctggccgtggtgcggaagatcggccgagtactacgaccacttgcgagacaatctgg

SEQ ID NO: 69 - DNA, 2379 bp, Homo sapiens
ccacgcgtccggaataaggctcgtctgagagctgtgacattcatctgactctagtgaaagtccaacagccactccctttttggcctccaactgggcaccatgagggcctgcatctccctggtattggccgtgctgtgtggcctggcctgggctgacttgtactcggcacccacctcctgccagggccgctgctacgaagcctttgacaagcaccaccaatgtcactgcaatgcccgctgccaagagtttgggaactgctgcaaggattttgagagcctgtgtagtgaccacgaggtctcccacagcagtgatgccataacaaaagaggagattcagagcatctctgagaagatctacagggcagacaccaacaaagcccagaaggaagacatcgttctcaatagccaaaactgcatctccccgtcagagaccagaaaccaagtggatcgctgcccaaagccactcttcacttatgtcaatgagaagctgttctccaagcccacctatgcagccttcatcaacctcctcaacaactaccagcgggcaacaggccatggggagcacttcagtgcccaggagctggccgagcaggacgccttcctcagagagatcatgaagacagcagtcatgaaggagctctacagcttcctccatcaccagaatcgctatggctcagagcaagagtttgtcgatgacttgaagaacatgtggtttgggctctattcaagaggcaatgaagagggggactcgagtggctttgaacatgtcttctcaggtgaggtaaaaaaaggcaaggttactggcttccataactggatccgcttctacctggaggagaaggagggtctggttgactattacagtcacatctacgatgggccttgggattcttaccccgatgtgctggcaatgcagttcaactgggacggctactataaggaagtgggctctgctttcatcggcagcagccctgagtttgagtttgcactctactccctgtgcttcatcgccaggccaggcaaagtgtgccagttaagcctgggaggatatcccttagctgtccggacatatacctgggacaagtccacctatgggaatggcaagaagtacatcggcacagcctacatagtgtcttccacctaatagaacttcgagccagaaaggggcatgagggctcttgcgagactgaagtgctatcttctctggactagagagragagggagaggactggaagggatcaccaaatctcaaagcaatgagaagcattcctaaatcccaaagtgcccacatgggaaagagataaaatgtacaaattagaaaaatgtggataaacagtcaaacctttatcctctagaattttggcaatgttgactaagaaacagagtccaagcagagaaggtaggaaccctccatagctctctgccctgatgtgtgggggaactaggaagaagtcctttgacctcaccaggcctcatgcttccctttaatgtaaagggaaggggtttgcccactttcctctttttggggttggtgagagggcaaaccctgatatttttactgtgaaggtgttttcagttgttcttaggaagaacagctgatagaaattcaagattactataatggctgttattatacacagctctgtaaactaccactcagccctgtgttggggtcctcaaagaagtaaggccacagtaatcaagcaagggcctttggttttttccagagttagatcctctcagaacagagtctgggagaactccaatgctgaatggagaagggtaataggttggtgcagtgaatgggctgggggtggggtggccttctccaggcctgagtgtttttgtgtccagctcagtatctgcaacaagaagtttcccacttgtggatgtttagtgcagccacagacttgtattttgatccccaattttttttttgaaagagttctcctcataggaggatgattcagcatcagaagaagaaggaacccatagcttggtgtcattaacataattattttaagccttatccagcagccataatttgaataactctacgagaccagagagactgtagttccctattttaacctcaattatgcatttgtcccccaaccccactgagaactaaatgctgtaccacagagccgggtgtgaactatggtttagaaggttcaagtttccaattaaagtcattgaagaaaacttgaaatgagtgtcttctttgtatatggcctccctccaatgtctgtctccctgccttttccctagagcagggctggcagtgatacttttgctctagagtcttttcagaatggcttgaagaatgtggtatctgggtgaagtctctgttgactcactaagtctctctagccaaga

SEQ ID NO: 70 - DNA, 1238 bp, Homo sapiens
ccacgcgtccgagcagagctaccatgtcctcttggagcagacagcgaccaaaaagcccagggggcattcaaccccatgtttctagaactctgttcctgctgctgctgttggcagcctcagcctggggggtcaccctgagccccaaagactgccaggtgttccgctcagaccatggcagctccatctcctgtcaaccacctgccgaaatccccggctacctgccagccgacaccgtgcacctggccgtggaattcttcaacctgacccacctgccagccaacctcctccagggcgcctctaagctccaagaattgcacctctccagcaatgggctggaaagcctctcgcccgaattcctgcggccagtgccgcagctgagggtgctggatctaacccgaaacgccctgaccgggctgccctcgggcctcttccaggcctcagccaccctggacaccctggtattgaaagaaaaccagctggaggtcctggaggtctcgtggctacacggcctgaaagctctggggcatctggacctgtctgggaaccgcctccggaaactgccccccgggctgctggccaacttcaccctcctgcgcacccttgaccttggggagaaccagttggagaccttgccacctgacctcctgaggggtccgctgcaattagaacggctacatctagaaggcaacaaattgcaagtactgggaaaagatctcctcttgccgcagccggacctgcgctacctcttcctgaacggcaacaagctggccagggtggcagccggtgccttccagggcctgcggcagctggacatgctggacctctccaataactcactggccagcgtgcccgaggggctctgggcatccctagggcagccaaactgggacatgcgggatggcttcgacatctccggcaacccctggatctgtgaccagaacctgagcgacctctatcgttggcttcaggcccaaaaagacaagatgttttcccagaatgacacgcgctgtgctgggcctgaagccgtgaagggccagacgctcctggcagkggccaagtcccagtgagmccaggggcttggkttgagggtggggggtctggtagaacactgcaacccgcttaacaaataatcccagccccttgtccttccttccagctgagccctgaccacactggggctctctgagtgcagggtctgatgctgagtcccacttagcttgggggcagcaaccaagggg

SEQ ID NO: 71 - DNA, 1234 bp, Homo sapiens
ccacgcgtccgggaaagaggaagtgctagagagagcccccttcagtgtgcttctgacttttacggacttggcttgttagaaggctgaaagatgatggcaggaatgaaaatccagcttgtatgcatgctactcctggctttcagctcctggagtctgtgctcagattcagaagaggaaatgaaagcattagaagcagatttcttgaccaatatgcatacatcaaagattagtaaagcacatgttccctcttggaagatgactctgctaaatgtttgcagtcttgtaaataatttgaacagcccagctgaggaaacaggagaagttcatgaagaggagcttgttgcaagaaggaaacttcctactgctttagatggctttagcttggaagcaatgttgacaatataccagctccacaaaatctgtcacagcagggcttttcaacactgggagttaatccaggaagatattcttgatactggaaatgacaaaaatggaaaggaagaagtcataaagagaaaaattccttatattctgaaacggcagctgtatgagaataaacccagaagaccctacatactcaaaagagattcttactattactgagagaataaatcatttatttacatgtgattgtgattcatcatcccttaattaaatatcaaattatatttgtgtgaaaatgtgacaaacacacttatctgtctcttctacaattgtggtttattgaatgtgatttttctgcactaatataaattagactaagtgttttcaaataaatctaaatcttcagcatgatgtgttgtgtataattggagtagatattaattaagtcacctgtataatgttttgtaattttgcaaaacatatcttgagttgtttaaacagtcaaaatgtttgatattttataccagcttatgagctcaaagtactacagcaaagcctagcctgcatatcattcacccaaaacaaagtaatagcgcctcttttattattttgactgaatgttttatggaattgaaagaaacatacgttcttttcaagacttcctcatgaatctctcaattataggaaaagttattgtgataaaataggaacagctgaaagattgattaatgaactattgttaattcttcctattttaatgaatgacattgaactgaattttttgtctgttaaatgaacttgatagctaataaaaagacaactagccatcaaaawmaaaaaaaaaaaaaaa

SEQ ID NO: 72 - DNA, 891 bp, Homo sapiens
  misc_feature (815)..(815): n equals a,t,g, or c
  misc_feature (822)..(822): n equals a,t,g, or c
  misc_feature (854)..(855): n equals a,t,g, or c
ccacgcgtccgagagaatgaggccggcgttcgccctgtgcctcctctggcaggcgctctggcccgggccgggcggcggcgaacaccccactgccgaccgtgctggctgctcggcctcgggggcctgctacagcctgcaccacgctaccatgaagcggcaggcggccgaggaggcctgcatcctgcgaggtggggcgctcagcaccgtgcgtgcgggcgccgagctgcgcgctgtgctcgcgctcctgcgggcaggcccagggcccggagggggctccaaagacctgctgttctgggtcgcactggagcgcaggcgttcccactgcaccctggagaacgagcctttgcggggtttctcctggctgtcctccgaccccggcggtctcgaaagcgacacgctgcagtgggtggaggagccccaacgctcctgcaccgcgcggagatgcgcggtactccaggccaccggtggggtcgagcccgcaggctggaaggagatgcgatgccacctgcgcgccaacggctacctgtgcaagtaccagtttgaggtcttgtgtcctgcgccgcgccccggggccgcctctaacttgagctatcgcgcgcccttccagctgcacagcgccgctctggacttcagtccacctgggaccgaggtgagtgcgctctgccggggacagctcccgatctcagttacttgcatcgcggacgaaatcggcgctcgctgggacaaactctcgggcgatgtgttgtgtccctgccccgggaggtacctccgtgctggcaaatgcgcagagctccctaactgcctagacgacttgngaggctntgcctgcgaatgtgctacgggcttcgagctgnngaaggacggccgctcttgtgtgaccagtggggaagg

SEQ ID NO: 73 - DNA, 629 bp, Homo sapiens
  misc_feature (601)..(601): n equals a,t,g, or c
  misc_feature (610)..(610): n equals a,t,g, or c
  misc_feature (613)..(613): n equals a,t,g, or c
ccacgcgtccgrgagaacatgcagctcggcactgggctcctgctggccgccgtcctgagcctgcagctggctgcagccgaagccatatggtgtcaccagtgcacgggcttcggagggtgctcccatggatccagatgcctgagggactccacccactgtgtcaccactgccacccgggtcctcagcaacaccgaggatttgcctctggtcaccaagatgtgccacataggctgccccgatatccccagcctgggcctgggcccctacgtatccatcgcttgctgccagaccagcctctgcaaccatgactgacggctgccctcctccaggcccccggacgctcagcccccacagcccccacagcctggcgccagggctcacggccgcccctccctcgagactggccagcccacctctcccggcctctgcagccaccgtccagcaccgcttgtcctagggaagtcctgcgtggagtcttgcctcaatctgctgccgtccaagcctggggcccatcgtgcctgccgccccttcaggtcccgacctccccacaataaaatgtgattggatcgtgtggtacaagctaaaaaaaaaaaaaaagggnccgttttanagnatccaagtttacgaac

SEQ ID NO: 74 - DNA, 1181 bp, Homo sapiens
  misc_feature (1105)..(1105): n equals a,t,g, or c
ccacgcgtccgaacgaaagcagtgtcaagacagtaaggattcaaaccatttgccaaaaatgagtctaagtgcatttactctcttcctggcattgattggtggtaccagtggccagtactatgattatgattttcccctatcaatttatgggcaatcatcaccaaactgtgcaccagaatgtaactgccctgaaagctacccaagtgccatgtactgtgatgagctgaaattgaaaagtgtaccaatggtgcctcctggaatcaagtatctttaccttaggaataaccagattgaccatattgatgaaaaggcctttgagaatgtaactgatctgcagtggctcattctagatcacaaccttctagaaaactccaagataaaagggagagttttctctaaattgaaacaactgaagaagctgcatataaaccacaacaacctgacagagtctgtgggcccacttcccaaatctctggaggatctgcagcttactcataacaagatcacaaagctgggctcttttgaaggattggtaaacctgaccttcatccatctccagcacaatcggctgaaagaggatgctgtttcagctgcttttaaaggtcttaaatcactcgaataccttgacttgagcttcaatcagatagccagactgccttctggtctccctgtctctcttctaactctctacttagacaacaataagatcagcaacatccctgatgagtatttcaagcgttttaatgcatttcagtatctgcgtttatctcacaacgaactggctgatagtggaatacctggaaattctttcaatgtgtcatccctggttgagctggatctgtcctataacaagcttaaaaacataccaactgtcaatgaaaaccttgaaaactattacctggaggtcaatcaacttgagaagtttgacataaagagcttctgcaagatcctggggccattatcctactccaagatcaagcatttgcgtttggatggcaatcgcatctcagaaaccagtcttccaccggatatgtatgaatgtctacgtgttgctaacgaagtcactcttaattaatatctgtatcctggaacaatattttatggntatgtttttctgtgtgtcagttttcatagtatccatattttattactggttattacttccatgaattttaaaatct

SEQ ID NO: 75 - DNA, 643 bp, Homo sapiens
  misc_feature (629)..(629): n equals a,t,g, or c
ccacgcgtccggcaatatgcatcttgcacgtctggtcggctcctgctccctccttctgctactgggggccctgtctggatgggcggccagcgatgaccccattgagaaggtcattgaagggatcaaccgagggctgagcaatgcagagagagaggtgggcaaggccctggatggcatcaacagtggaatcacgcatgccggaagggaagtggagaaggttttcaacggacttagcaacatggggagccacaccggcaaggagttggacaaaggcgtccaggggctcaaccacggcatggacaaggttgcccatgagatcaaccatggtattggacaagcaggaaaggaagcagagaagcttggccatggggtcaacaacgttgctggacaggccgggaaggaagcagacaaagcggtccaagggttccacactggggtccaccaggctgggaaggaagcagagaaacttggccaaggggtcaaccatgctgctgaccaggctggaaaggaagtggagaagcttggccaaggtgcccaccatgctgctggccaggccgggaaggagctgcagaatgctcataatggggtcaaccaagccagcaaggaggccaaccagctgctgaatggcnaccatcaaagcgga

SEQ ID NO: 76 - DNA, 1032 bp, Homo sapiens
  misc_feature (958)..(958): n equals a,t,g, or c
  misc_feature (978)..(979): n equals a,t,g, or c
  misc_feature (1005)..(1005): n equals a,t,g, or c
  misc_feature (1012)..(1012): n equals a,t,g, or c
ccacgcgtccggacattcatctgactctagtgaaagtccaacagccactccctttttggcctccaactgggcaccatgagggcctgcatctccctggtattggccgtgctgtgtggcctggcctgggctgaggaccacaaagagtcagagccattgccacagctggaggaagagacagaagaggccctcgccagcaacttgtactcggcacccacctcctgccagggccgctgctacgaagcctttgacaagcaccaccaatgtcactgcaatgcccgctgccaagagtttgggaactgctgcaaggattttgagagcctgtgtagtgaccacgaggtctcccacagcagtgatgccataacaaaagaggagattcagagcatctctgagaagatctacagggcagacaccaacaaagcccagaaggaagacatcgttctcaatagccaaaactgcatctccccgtcagagaccagaaaccaagtggatcgctgcccaaagccactcttcacttatgtcaatgagaagctgttctccaagcccacctatgcagccttcatcaacctcctcaacaactaccagcgggcaacaggccatggggagcacttcagtgcccaggagctggccgagcaggacgccttcctcagagagatcatgaagacagcagtcatgaaggagctctacagcttcctccatcaccagaatcgctatggctcagagcaagagtttgtcgatgacttgaagaacatgtggtttgggctctattcaagaggcaatgaagagggggactcgagtggctttgaacatgtcttctcaggtgaggtaaaaaaaggcaaggttactggcttccataactggatccgcttctacctggaggagaaggagggtctggttgactattacagtcacatctacgatgggccttgggattcttaccccgatgtgctggcaatgcagntcaactgggacggctactanntaggaagtgggctctgctttcatcgncagcagncctgagtttgagtttgcact

SEQ ID NO: 77 - DNA, 1115 bp, Homo sapiens; identical to SEQ ID NO: 37

SEQ ID NO: 78 - DNA, 486 bp, Homo sapiens
ccacgcgtccgcggacgcgtgggccgcgcgccccgagcccccgcgccatgaagctcgccgccctcctggggctctgcgtggccctgtcctgcagctccgctgctgctttcttagtgggctcggccaagcctgtggcccagcctgtcgctgcgctggagtcggcggcggaggccggggccgggaccctggccaaccccctcggcaccctcaacccgctgaagctcctgctgagcagcctgggcatccccgtgaaccacctcatagagggctcccagaagtgtgtggctgagctgggtccccaggccgtgggggccgtgaaggccctgaaggccctgctgggggccctgacagtgtttggctgagccgagactggagcatctacacctgaggacaagacgctgcccacccgcgagggctgaaaaccccgccgcggggaggaccgtycatccccttcccccggcccctctcaataaacgtggataagag

SEQ ID NO: 79 - DNA, 1057 bp, Homo sapiens
  misc_feature (1048)..(1048): n equals a,t,g, or c
ccggctgcgcacgcgacgccccctccaggccccgctcctgcgccctatttggtcattcggggggcaagcggcgggaggggaaacgtgcgcggccgaaggggaagcggagccggcgccggctgcgcagaggagccgctctcgccgccgccacctcggctgggagcccacgaggctgccgcatcctgccctcggaacaatgggactcggcgcgcgaggtgcttgggccgcgctgctcctggggacgctgcaggtgctagcgctgctgggggccgcccatgaaagcgcagccatggcggcatctgcaaacatagagaattctgggcttccacacaactccagtgctaactcaacagagactctccaacatgtgccttctgaccatacaaatgaaacttccaacagtactgtgaaaccaccaacttcagttgcctcagactccagtaatacaacggtcaccaccatgaaacctacagcggcatctaatacaacaacaccagggatggtctcaacaaatatgacttctaccaccttaaagtctacacccaaaacaacaagtgtttcacagaacacatctcagatatcaacatccacaatgaccgtaacccacaatagttcagtgacatctgctgcttcatcagtaacaatcacaacaactatgcattctgaagcaaagaaaggatcaaaatttgatactgggagctttgttggtggtattgtattaacgctgggagttttatctattctttacattggatgcaaaatgtattactcaagaagaggcattcggtatcgaaccatagatgaacatgatgccatcatttaaggaaatccatggaccaaggatggaatacagattgatgctgycctatcaattaattttggtttattaatagtttaaaacaatattctctttttgaaaatagtataaacaggccatgcatataatgtacagtgtattacgtaaatatgtaaagattcttcaaggtaacaagggtttgggttttgaaataaacatctggatcttatagaccgttcataccatggtttntagcagttc

SEQ ID NO: 80 - DNA, 1449 bp, Homo sapiens
ttttcctccctgaactggcccaatgactggctccctcacgctgaccactcctctgggctggcctcctgcactcgcgctaacagcccaggctccagggacagcctgcgttcctgggctggctgggtgcagctctcttttcaggagagaaagctctcttggaggagctggaaaggtgcccgactccagccatgctggcgctactgtgttcctgcctgctcctggcagccggtgcctcggacgcctggacgggcgaggactcggcggagcccaactctgactcggcggagtggatccgagacatgtacgccaaggtcacggagatctggcaggaggtcatgcagcggcgggacgacgacggcacgctccacgccgcctgccaggtgcagccgtcggccacgctggacgccgcgcagccccgggtgaccggcgtcgtcctcttccggcagcttgcgccccgcgccaagctcgacgccttcttcgccctggagggcttcccgaccgagccgaacagctccagccgcgccatccacgtgcaccagttcggggacctgagccagggctgcgagtccaccgggccccactacaacccgctggccgtgccgcacccgcagcacccgggcgacttcggcaacttcgcggtccgcgacggcagcctctggaggtaccgcgccggcctggccgcctcgctcgcgggcccgcactccatcgtgggccgggccgtggtcgtccacgctggcgaggacgacctgggccgcggcggcaaccaggccagcgtggagaacgggaacgcgggccggcggctggcctgctgcgtggtgggcgtgtgcgggcccgggctctgggagcgccaggcgcgggagcactcagagcgcaagaagcggcggcgcgagagcgagtgcaaggccgcctgagcgcggcccccacccggcggcggccagggacccccgaggcccccctctgcctttgagcttctcctctgctccaacagacaccttccactctgaggtctcaccttcgcctytgctgaagtctccccgcagccctctccacccagaggtctccctataccgagacccaccatccttccatcctgaggaccgccccaaccctcggagccccccactcagtaggtctgaaggcctccatttgtaccgaaacaccccgctcacgctgacagcctcctaggctccctgaggttcctcctaggcgctcagaggccgctctggggggttgcctcgagtccccccacccctccccacccaccaccgctcccgcggcaagccagcccgtgcaacggaagccaggccaactgccccgcgtcttcagctgtttcgcatccaccgccaccccactgagagctgctcctttgggggaatgtttggcaacctttgtgttacagattaaaaattcagcaattcaaaaaaaaaaaaaaaaaaaaaaaaaaaaaaa

SEQ ID NO: 81 - DNA, 569 bp, Homo sapiens
ccacgcgtccgcggacgcgtgggcggacgcgtggggttgcgatgaaagttctaatctcttccctcctcctgttgctgccactaatgctgatgtccatggtctctagcagcctgaatccaggggtcgccagaggccacagggaccgaggccaggcttctaggagatggctccaggaaggcggccaagaatgtgagtgcaaagattggttcctgagagccccgagaagaaaattcatgacagtgtctgggctgccaaagaagcagtgcccctgtgatcatttcaagggcaatgtgaagaaaacaagacaccaaaggcaccacagaaagccaaacaagcattccagagcctgccagcaatttctcaaacaatgtcagctaagaagctttgctctgcctttgtaggagctctgagcgcccactcttccaattaaacattctcagccaagaagacagtgagcacacctaccagacactcttcttctcccacctcactctcccactgtacccacccctaaatcattccagtgctctcaaaaagcatgtttttcaagatcaaaaaaaaaaaaaaag

SEQ ID NO: 82 - DNA, 903 bp, Homo sapiens
  misc_feature (897)..(897): n equals a,t,g, or c
aatgaaggggaaagactaactgtctaacccaattgaaaatcaaatgatgaccaaacttcaattgtagtatttgtgctgattgcttggatactgtttcttcagaaactatgctcaagtcacagtttgtccctaaccacatcctaccaccacatcctgctgggctaaaatcccaaaaagtaataagagacgcattcaactttatgagaggaaagcaaaacctaatctttcaggtggtgaggtccacccagtatggagctcaaaggtgccattgttctgctcatgtttataaagggagctgccatgtttctctcaacgcagagttgggagcaactccagagcctccttcaagatgctgctggtcctgctctcagtggtccttctggctctgagctcagctcagagcacagataatgatgtgaactatgaagactttactttcaccataccagatgtagaggactcaagtcagagaccagatcagggaccccagagacctcctcctgaaggactcctacctagaccccctggtgatagtggtaaccaagatgatggtcctcagcagagaccaccaaaaccaggaggccatcaccgccatcctcccccacctccttttcaaaatcagcaacgaccaccccaacgaggacaccgtcaactctctctaccccgatttccttctgtcagcctgcaggaagcatcatcattcttccggagggacagaccagcaagacatccccaggagcaaccactctggtaatctagaattcagtggcagaaaataaataagaagataacttccttcagaaagccatgacattgaaataatgtggtcataactctttcttcagtataccaataaaatattaatagcatgcaaaaaaaaaaaaaaaaaaaaccaanattaag

SEQ ID NO: 83 - DNA, 623 bp, Homo sapiens
ccacgcgtccggcccgacctcaccaggagaacatgcagctcggcactgggctcctgctggccgccgtcctgagcctgcagctggctgcagccgaagccatatggtgtcaccagtgcacgggcttcggagggtgctcccatggatccagatgcctgagggactccacccactgtgtcaccactgccacccgggtcctcagcaacaccgaggatttgcctctggtcaccaagatgtgccacataggctgccccgatatccccagcctgggcctgggcccctacgtatccatcgcttgctgccagaccagcctctgcaaccatgactgacggctgccctcctccaggcccccggacgctcagcccccacagcccccacagcctggcgccagggctcacggccgcccctccctcgagactggccagcccacctctcccggcctctgcagccaccgtccagcaccgcttgtcctagggaagtcctgcgtggagtcttgcctcaatctgctgccgtccaagcctggggcccatcgtgcctgccgccccttcaggtcccgacctccccacaataaaatgtgattggatcgtgtggtacaaaaaaaaaaaaaaaaaaaaaaaaaaaaaaag

SEQ ID NO: 84 - DNA, 795 bp, Homo sapiens
ggggaggtggactctgagaagcccaggcagttgaggacaggagagagaaggctgcagacccagagggagggaggacagggagtcsgggaggaggacagaggagggcacagagacgcagagcaagggcggcaaggaggagaccctggtgggaggaagacactctggagagagagggggctgggcagagatgaagttccaggggcccctggcctgcctcctgctggccctctgcctgggcagtggggaggctggccccctgcagagcggagaggaaagcactgggacaaatattggggaggcccttggacatggcctgggagacgccctgagcgaaggggtgggaaaggccattggcaaagaggccggaggggcagctggctctaaagtcagtgaggcccttggccaagggaccagagaagcagttggcactggagtcaggcaggttccaggctttggcgtagcagatgctttgggcaacagggtcggggaagcagcccatgctctgggaaacactgggcacgagattggcagacaggcagaagatgtcattcgacacggagcagatgctgtccgcggctcctggcagggggtgcctggccacaatggtgcttgggaaacttctggaggccatggcatctttggctctcaaggtggccttggaggccagggccaggrcaatcctggaggtctgggagactccgtggggtccacggataccccggaaactcagcaggcagctttggaatgaatcctcagggagcttcctggggtcaaggagggcaatggagggccaca

SEQ ID NO: 85 - DNA, 807 bp, Homo sapiens
ccacgcgtccgagaacatgcagctcggcactgggctcctgctggccgccgtcctgagcctgcagctggctgcagccgaagccatatggtgtcaccagtgcacgggcttcggagggtgctcccatggatccagatgcctgagggactccacccactgtgtcaccactgccacccgggtcctcagcaacaccgaggatttgcctctggtcaccaagatgtgccacataggctgccccgatatccccagcctgggcctgggcccctacgtatccatcgcttgctgccagaccagcctctgcaaccatgactgacggctgccctcctccaggcccccggacgctcagcccccacggcccccacagcctggcgccagggctcacggccgcccctccctcgagactggccagcccacctctcccggcctctgcagccaccgtccagcaccgcttgtcctagggaagtcctgcgtggagtcttgcctcaatctgctgccgtccaagcctggggcccattgtgcctgccgccccttcaggtcccgacctccccacaataaaatgtgattggatcgtgtggtaaaaaaaaaaaaaaaaaaaaaaaaaaaaaaaaaaaaaaaaaaaaaaaaaaaaaaaaaaaaaaaaaaaaaaaaaaaaaaaaaaaaaaaaaaaaaaaaaggggggggccgtttaaaaaaatccttggggggcccaaatttaacgggacccaattttttttgaaaaaaggggcccttaaggggggccgatttaaaagttaggcctgggccgggttttaaaaaggtgggaattggaaa

SEQ ID NO: 86 - DNA, 681 bp, Homo sapiens
ccacgcgtccgcggacgcgtgggttcatagtgttcagaaagttcatttaaaaataaagctaaatttaggtcattcatctgcttacaatctaggaacacatcccaaagtcttccacatccaaacatactctaccctatggggtcctgccttctctgacttcacatattattctccctacagcacactgcattctagctcatggccttctctctggtcggaaataaaccaagcttgtttctatcccatggactgtgtgctgaatccttcctctgacaggaatgctctcccgccttcttccaccccctttttttttcttcttgtatttcattctcaggttaatgtcaccttgccagggaaaacttctctcatcactctatccaatgtctccattttcagaatatatactgaattcaaatacttcttcttctctctactgkcatttagcaacaaacttcttatcatttcttgcttggattattgcaataatttcmaaactggattgccttctttagtcttgccctgcttcmcagtttataagtataacgtcactgtgatccttttaaaacatcaccgtctaattcatgtcatttttcctcttgatatattccaagtgtaccccctgtcacatagaacaaacatcaaaataaaaaaaaaaaaaaaaaaaaaaaaaaaaaaaaaagg

SEQ ID NO: 87 - DNA, 1142 bp, Homo sapiens
aagagctgctggtcagagcacttcctggaacttgctattggtcaggacgtttcctatgctaataaaggggtggcccgtagaagattccagcaccctcccctaactccaggccagactcctttcagctaaaggggagatctggatggcatctacttcgtatgactattgcagagtgcccatggaagacggggataagcgctgtaagcttctgctggggataggaattctggtgctcctgatcatcgtgattctgggggtgcccttgattatcttcaccatcaaggccaacagcgaggcctgccgggacggccttcgggcagtgatggagtgtcgcaatgtcacccatctcctgcaacaagagctgaccgaggcccagaagggctttcaggatgtggaggcccaggccgccacctgcaaccacactgtgatggccctaatggcttccctggatgcagagaaggcccaaggacaaaagaaagtggaggagcttgagggagagatcactacattaaaccataagcttcaggacgcgtctgcagaggtggagcgactgagaagagaaaaccaggtcttaagcgtgagaatcgcggacaagaagtactaccccagctcccaggactccagctccgctgcggcgccccagctgctgattgtgctgctgggcctcagcgctctgctgcagtgagatcccaggaagctggcacatcttggaaggtccgtcctgctcggcttttcgcttgaacattcccttgatctcatcagttctgagcgggtcatggggcaacacggttagcggggagagcacggggtagccggagaagggcctctggagcaggtctggaggggccatggggcagtcctgggtgtggggacacagtcgggttgacccagggctgtctccctccagagcctccctccggacaatgagtcccccctcttgtctcccaccctgagattgggcatggggtgcggtgtggggggcatgtgctgcctgttgttatgggttttttttgcggggggggttgcttttttctggggtctttgagctccaaaaaataaacacttcctttgagggagagcacaccttaaaaaaaaaaaaaaaaaaaaaaaaaaaaaaaaaaaaaaaaaaaagggcggccgct

SEQ ID NO: 88 - DNA, 2135 bp, Homo sapiens
  misc_feature (12)..(12): n equals a,t,g, or c
  misc_feature (2131)..(2131): n equals a,t,g, or c
cgcccctggcgncgtgcctggtgccctgttccgcgtctgtgcgaccgtccgtcccgagcgcgcagccgcggcaggccaggtcagagcagcccaccatgggatggggagggggtggaggctgcaccccgcgcccacccatccaccagcagccgccggagcgccgcgtggtcaccgttgtctttctcggcctcctgctggacctcctggccttcacgctgctgctgcccctgctgcccgggctgttggagagccacggccgtgcccacgaccccctctatggctcctggcagggcggggtggactggtttgccaccgccatcgggatgccagtggagaagaggtacaacagtgtcctgttcggaggtctcattggctcggcattctctgtcctgcagtttctgtgtgcgccactcactggggccacctctgactgcttggggaggcgcccggtgatgctgctgtgcctggtatgttcctgggcctgggtgcccatggggaagcctcctcccamccagccagtagccccatggggttargtggggagarggargtggctgtgggsccctcatggccactggttggccctcatcgcatcctggaggggttctcgggggaccagtggctcctgttccagagccaggctttcaaggagctgctcctggcccctaggaaggcactgagaacgcaagtggccctcagatgcttcgaaatagggcagggttgaggggtgttgtctgggttgccaagccctactctgagccactcctggccttaagcgaccgcccctgcctcttggcccctgcccctgggcagatgggtgtggccacctcatatgcagtctgggccacctctcggagctttgcggccttcctggcctccaggctgattgggggcatcagcaaagggaacgtcagcctctccacggccatcgttgctgacctgggctcgcctctggcccgcagtcaaggcatggcggtcattggggtggccttctcactgggcttcaccctgggccctatgctcggagcctccctgcccctggaaatggcaccctggtttgccctgctcttcgcagcctccgacctgctgttcatcttctgcttcctgccagagacgctgcccctggagaaacgggcgccctctatcgccctggggttccgtgatgcggctgatctgctcagccccctggccctgctgcgcttctcggctgtcgctcgtggccaggacccaccctctggagacaggctcagcagcctgcgccgcctgggcctagtctacttcctctacctcttcctgttctcgggcctggagtacacgctgagcttcctcacacaccagcgcttccagttcagtagcctacagcaggggaagatgtttttcctcatcggcctcaccatggccaccatccagggtgcctatgcccggcggatccaccctggcggggaagttgctgccgtgaagcgggccctcctgctgctggtgcccgccttcctcctcatcggctggggacgttctctgcccgtgctgggcctggggctgctgctctactcctttgccgccgccgttgtggtgccctgcctgtcctccgtggtcgctggctatggctcaccagggcagaagggcacggtcatgggtacactgcgcagcctaggtgctctggccagggccgcggggcccctggtggccgcttcagtgtactggctggccggggcccaggcctgcttcaccacgtggtccgggctctttttgctccccttcttcctcctgcagaagctgagttacccggcacagacgctcaaggctgagtagctgagccactgtgcccaggctgtgggcaccaggcagagtgggagcctaggtcaggcccctgcccactgcctgacccccaccccccgccagtccagggagaccctgtgggtgggggccggcccctaagcaggaagctcaggcagctcctccagacttactccttcagtgactccgagctgcagcactccaaggctgtcagggcttctgtttgttttttaaactatgcaccaggtttctgatgatgaaataaagcacctgtttgttttawaaaaaaacggcacgagggggggcccggtacccaattggccctagaagaggcganagga

SEQ ID NO: 89 - DNA, 649 bp, Homo sapiens
cagtgatgttgcctatatttaaattttctcaaatggccaagctctgatggtctactttatttgagcaatagttgagacttataattgcctataaataaacaaacaaatgaactatttgtttttttttctcacaacatctggcctatattgtctgtcaggaagccatggctccaatgtaaagtacatagttcttacatacttcaactgcagctggtccctgacctcaccaggtttcagagatgttcttaaaggaagccagctgtggcaggtcacagattcatgggaaatggaaagaaccaaggaatatagctcttgcctcacctttctacccactgcagatatagttcaagccagagtaatggaagaacttaacttactagcctctcaggctgctcctatccctacctcccagtgtacagcccctccccatctctttagtcccctttccctcacttccccttttataatgtcacacaaatcagggacagtaggatcacattataacctactttgtcatagggattcgatttttcttatatcaaatcatgtttcctgaaacccagctgsggcatatgcactcaatgtctaatacatacttattaatgtaccggatattggccttgcccctggatatcagcaatatattata

SEQ ID NO: 90 - DNA, 1501 bp, Homo sapiens
  misc_feature (1424)..(1424): n equals a,t,g, or c
ccacgcgtccggcaaaatggcggaaccgccgagccccgtgcactgtgtcgctgccgcggcccccaccgccaccgtctcggagaaagaaccgtttggcaagctgcaactctcctcccgggaccctccgggttctctgtccgccaagaaggtccggactgaggagaagaaggcaccgcggagagtgaacggagaagggggcagcggcgggaacagcaggcagctgcagccgccggcagcaccttcgcctcagagctatggcagccccgcgtcttggagctttgcccctctgtctgctgctccctccccgtcctcttctcggagcagtttctctttctccgctggcacggccgttccctcctcagcctccgcttccttgtctcagccggtgccgcgcaaactgctggtccctcctacgctgctgcacgctcagcctcaccatctcctcctgcccgccgccgccgccgctgcctcggctaacgccaagtcgcgcagacctaaggagaagcgggagaaggagaggaggaggcacggtctcggtggggcccgagaggccggcggggcctcccgggaggagaacggggaggtgaagccgctgccccgagataaaatcaaagacaaaattaaagagagagacaaagaaaaagaragagaaaaaaagaaacataaagtaatgaatgagatcaagaaagagaatggagaagtaaagattttgctgaaaagtgggaaggagaaaccaaaaacaaatatagaagacttacaaattaaaaaggtaaaraaraaaaaraaaaagaaacacaaagagaatgaaaaacggaagcgtccgaaaatgtatagcaaatctattcagaccatctgctcaggattgctaactgatgttgaagatcaagcagccaaaggcatcctaaatgataacataaaagattacgttgggaagaatttggataccaagaactatgattccaaaattccagagaacagtgagtttccatttgtctcattaaaggagccacgagttcagaataacctcaaaaggttggacactttggaatttaaacaactcattcatatagagcaccagcctaatggaggtgcatcggttatccatgcctacagtaacgaactctcccacctgtctcctatggagatggagaggtttgcagaagagttgtgggkcyagtgktcagtgaaaatgaaactctgagttctacgtgatgggtatcgtcatggggcagtactttatttactgagcttttagactatctttcatctaattccccatccgcagtgaaatgggctttggggcaccaaatatagcacacggtaagtgcaattctgggcggcaaggaggtctcctggtcacaagggggcacgagaaaaacctgcggggcgtgtcagacagaggactctcggctgacgtggggcgncacgagcgcgccggggcgatcaacgcgacagcagcgccgcgggcggacaaccggggcgcacaaaaaaacgcacgcaa

SEQ ID NO: 91 - DNA, 587 bp, Homo sapiens
ccacgcgtccgccaggagaacatgcagctcggcactgggctcctgctggccgccgtcctgagcctgcagctggctgcagccgaagccatatggtgtcaccagtgcacgggcttcggagggtgctcccatggatccagatgcctgagggactccacccactgtgtcaccactgccacccgggtcctcagcaacaccgaggatttgcctctggtcaccaagatgtgccacataggctgccccgatatccccagcctgggcctgggcccctacgtatccatcgcttgctgccagaccagcctctgcaaccatgactgacggctgccctcctccaggcccccggacgctcagcccccacagcccccacagcctggcgccagggctcacggccgcccctccctcgagactggccagcccacctctcccggcctctgcagccaccgtccagcaccgcttgtcctagggaagtcctgcgtggagtcttgcctcaatctgctgccgtccaagcctggggcccattgtgcctgccgccccttcaggtcccgacctccccacaataaaatgtgattggatcgtgtggtaaaaaaaaa

SEQ ID NO: 92 - DNA, 692 bp, Homo sapiens
ccacgcgtccgccagcaatatgcatcttgcacgtctggtcggctcctgctccctccttctgctactgggggccctgtctggatgggcggccagcgatgaccccattgagaaggtcattgaagggatcaaccgagggctgagcaatgcagagagagaggtgggcaaggccctggatggcatcaacagtggaatcacgcatgccggaagggaagtggagaaggttttcaacggacttagcaacatggggagccacaccggcaaggagttggacaaaggcgtccaggggctcaaccacggcatggacaaggttgcccatgagatcaaccatggtattggacaagcaggaaaggaagcagagaagcttggccatggggtcaacaacgctgctggacagggcaaccatcaaagcggatcttccagccatcaaggaggggccacaaccacgccgttagcctctggggcctcggtcaacacgcctttcatcaaccttcccgccctgtggaggagcgtcgccaacatcatgccctaaactggcatccggccttgctgggagaataatgtcgccgttgtcacatcagctgacatgacctggaggggttgggggtgggggacaggtttctgaaatccctgaagggggttgtactgggatttgtgaataaacttgatacactaaaaaaaaaaaaaaaaaaaag

SEQ ID NO: 93 - DNA, 877 bp, Homo sapiens
ccacgcgtccgggaaactgccttcatcttgaaagaaaagctccaggtcccttctccagccacccagccccaagatggtgatgctgctgctgctgctttccgcactggctggcctcttcggtgcggcagagggacaagcatttcatcttgggaagtgccccaatcctccggtgcaggagaattttgacgtgaataagtatctcggaagatggtacgaaattgagaagatcccaacaacctttgagaatggacgctgcatccaggccaactactcactaatggaaaacggaaagatcaaagtgttaaaccaggagttgagagctgatggaactgtgaatcaaatcgaaggtgaagccaccccagttaacctcacagagcctgccaagctggaagttaagttttcctggtttatgccatcggcaccgtactggatcctggccaccgactatgagaactatgccctcgtgtattcctgtacctgcatcatccaactttttcacgtggattttgcttggatcttggcaagaaaccctaatctccctccagaaacagtggactctctaaaaaatatcctgacttctaataacattgatgtcaagaaaatgacggtcacagaccaggtgaactgccccaagctctcgtaaccaggttctacagggaggctgcacccactccatgttacttctgcttcgctttcccctaccccaccccccgccataaagacaaaccaatcaaccacgacaaaggaagttgacctaaacatgtaaccatgccctaccctgttaccttgctagctgcaaaataaacttgttgctgacctgctgtgctcgcaaaaaaaaaaaaaaaaaaaaaaaaaaaaaaaaaaaaaaaaaaaaaag

SEQ ID NO: 94 - DNA, 976 bp, Homo sapiens
ccacgcgtccggagatctggatggcatctacttcgtatgactattgcagagtgcccatggaagacggggataagcgctgtaagcttctgctggggataggaattctggtgctcctgatcatcgtgattctgggggtgcccttgattatcttcaccatcaaggccaacagcgaggcctgccgggacggccttcgggcagtgatggagtgtcgcaatgtcacccatctcctgcaacaagagctgaccgaggcccagaagggctttcaggatgtggaggcccaggccgccacctgcaaccacactgtgatggccctaatggcttccctggatgcagagaaggcccaaggacaaaagaaagtggaggagcttgagggagagatcactacattaaaccataagcttcaggacgcgtctgcagaggtggagcgactgagaagagaaaaccaggtcttaagcgtgagaatcgcggacaagaagtactaccccagctcccaggactccagctccgctgcggcgccccagctgctgattgtgctgctgggcctcagcgctctgctgcagtgagatcccaggaagctggcacatcttggaaggtccgtcctgctcggcttttcgcttgaacattcccttgatctcatcagttctgagcgggtcatggggcaacacggttagcggggagagcacggggtagccggagaagggcctctggagcaggtctggaggggccatggggcagtcctgggtgtggggacacagtcgggttgacccagggctgtctccctccagaggctccctccggacaatgagtcccccctcttgtctcccaccctgagattgggcatggggtgcggtgtggggggcatgtgctgcctgttgttatgggttttttttgcggggggggttgcttttttctggggtctttgagctccaaaaaataaacacttcctttgagggagagcacaaaaaaaaaaaaaaag

SEQ ID NO: 95 - DNA, 986 bp, Homo sapiens
  misc_feature (925)..(925): n equals a,t,g, or c
  misc_feature (944)..(945): n equals a,t,g, or c
ccacgcgtccgctccaggccagactcctttcagctaaaggggagatctggatggcatctacttcgtatgactattgcagagtgcccatggaagacggggataagcgctgtaagcttctgctggggataggaattctggtgctcctgatcatcgtgattctgggggtgcccttgattatcttcaccatcaaggccaacagcgaggcctgccgggacggccttcgggcagtgatggagtgtcgcaatgtcacccatctcctgcaacaagagctgaccgaggcccagaagggctttcaggatgtggaggcccaggccgccacctgcaaccacactgtgatggccctaatggcttccctggatgcagagaaggcccaaggacaaaagaaagtggaggagcttgagggagagatcactacattaaaccataagcttcaggacgcgtctgcagaggtggagcgactgagaagagaaaaccaggtcttaagcgtgagaatcgcggacaagaagtactaccccagctcccaggactccagctccgctgcggcgccccagctgctgattgtgctgctgggcctcagcgctctgctgcagtgagatcccaggaagctggcacatcttggaaggtccgtcctgctcggcttttcgcttgaacattcccttgatctcatcagttctgagcgggtcatggggcaacacggttagcggggagagcacggggtagccggagaagggcctctggagcaggtctggaggggccatggggcagtcctgggtgtggggacacagtcgggttgacccagggctgtctccctccagagcctccctccggacaatgagtcccccctcttgtctcccaccctgagattgggcatggggtgcggtgtggggggcatgtgctgcctgttgttatgggttttttttgcggngggggttgcttttttctgnngtctttgagctccaaaaaaataaacacttcctttgagggag

SEQ ID NO: 96 - DNA, 1927 bp, Homo sapiens
tgagaaagtgcctccttcattcccaggatcaggaccatctgccatccgagcgccacaaagagacattctgcacacacactcacacacacacacacacacacactctcacactcgcccagagacaaacttaaggtgaggagaaagagcgctagcttcacttgatctccagcttccaacttaagcagaacttgagagcatccgaactcctggatttcaggacaagtgaagaagattctttgggctataaagatgaagagtctacttcttctggtgctgatttcaatctgctgggctgatcatctttcagacaactatactctggatcatgacagagctattcacatccaagcagaaaatggcccccatctacttgtggaagcagagcaagccaaggtgttttcacacagaggtggcaatgttacactgccatgtaaattttatcgagaccctacagcatttggctcaggaatccataaaatccgaattaagtggaccaagctaacttcggattacctcaaggaagtggatgtttttgtttccatgggataccacaaaaaaacctatggaggctaccagggtagagtgtttctgaagggaggcagtgatagtgatgcttctctggtcatcacagacctcactctggaagattatgggagatataagtgtgaggtgattgaaggattagaagatgatactgttgtggtagcactggacttacaaggtgtggtattcccttactttccacgactggggcgctacaatctcaattttcacgaggcgcagcaggcgtgtctggaccaggatgctgtgatcgcctccttcgaccagctgtacgacgcctggcggggcgggctggactggtgcaatgccggctggctcagtgatggctctgtgcaatatcccatcacaaagcccagagagccctgtgggggccagaacacagtgcccggagtcaggaactacggattttgggataaagataaaagcagatatgatgttttctgttttacatccaatttcaatggccgtttttactatctgatccaccccaccaaactgacctatgatgaagcggtgcaagcttgtctcaatgatggtgctcagattgcaaaagtgggccagatatttgctgcctggaaaattctcggatatgaccgctgtgatgcgggctggttggcggatggcagcgtccgctaccccatctctaggccaagaaggcgctgcagtcctactgaggctgcagtgcgcttcgtgggtttcccagataaaaagcataagctgtatggtgtctactgcttcagagcatacaactgaatgtgcccttagagcgcatcagttttaaagtcattaagaacatgtgaaaggtgttttttttttccaatatgaactcatgcaagttaccaaaactgtgataacccttttttacttactgtaaagagtcattttcataaagatcaattcattgatttgttttttgtaaagctatcattcaatatatattataaattaatataaatttaagggaagctctatgtaaggagacttagagccaaactgtttaagctgtatcatcccaacaaagtatcctttcatgaacggggcatgcaatagcttaagaattgctaggattaaattaaggaaagtaaagctactcagagcagcaggttccacaagcacaaactttacacatttgtacaattttgaaatgcactacaataaacaaattagagcaacacatttgaaatacaggcttctttacataaactgagaggttatacaaaactcagtttcacaagggaacaatctatacctttctaaaagttaatatttcaagtctctaataggcagaatattttactctttaaaatcctgcctttctgaccaaaaaaaaaaaaaaaaaaattactgcggaccgacaagggaattc

SEQ ID NO: 97 - DNA, 4393 bp, Homo sapiens
aagagacagagaggcagggcagaaaaaaaaagcgcggctcccttatagctcgtgtcgtcccgccccgcaaaaggggatggcccaaggcgagcctcctcataaaagctcaactttaaaaaacgggaaaccgaaatgagccatcagatttgattgtgaacaaggactgactgcagaaaataatggaaaggatgtttaactcttttatctccgaacattgaatgagataaatttccagatgctgttctctattttaatgttattggaccaatgttctgtataaacaattaagatgtaaccatttaatagtctgtaacaatcaacctcagtactgtcactacaatattacattctgcaaatgttattctgttgtatcagatacaaaattttagtgaggtatctctaaggcacatagtagaaaacaaaattggttaattactcaagttcctttcactgtgatttggaaatgatttaatctttatagaatgagaaccttttttggactagcttttttattaaaatggctcaatttgtgttgataaggattgcattaatatttaatagtgcttgcttttcctctgggcacaccattttgatcattaaccagagtacctctactcttagcaaactctagtttatgacaagtatttaaaatatttaaaacaagcttatgcagttcttaaggacgaaggtaaatgagatgtaacttaaaaatagtattgggaaaatgttgatagttaacattagtggatttagactagccaaatgacatagtaggctctgaaacatcttgtcaagtatatgtattttgtgcatgaatttttgctggaaagctgtctttctctgaaaaacacaacgttcttagaatgaaaagaacaattataaaataattatcctatatgtgtttttcattctttttagtgtcatggcttcaaaaatgaaacatttattttaattgccgtaaaggaactgtatttttgttttgttttttaacacagcactttaaatccagtttgtgttttgtcaacttgaactggaatctcttttgttactttggaggtgataaatagttttcaaatctgctgatttgtatactgtggcacaagtatctttgaactttgatagtgaaaggagaccttcaacaatttttagtctaggcgagaggaatattaggaatgtgacttctaaattttacaatagagcagttattttaaggtcatggttaacatttcttaaggttcmactaaaattcagttaaaatttcagagctacgaggaacttaaatcttagctaaaaattacctgttgtagatagtattaattagattgtttgcagctattaattcatcataaagataaaatgaagaaactctccctttttttaaacaaaaaaaattatttctagattaataggctagtagttatttctgcagaaacaacgtatgggaactgaaagccacctatttttattttagactaatttaaaccacttggaatggattctaggaaacatcttaagcttgtgtgttgcctgtggtggttttttgtttgggggtgttttttggttttggtttgattttctgtattttgttatctggggattttttgtttgtttgttttggtttggttttggttttatatttttggcatgtctatggcagttaaaagtggtatattttgctttagatagggaatcaggttataatcattgttcttcctctaaactgcctcttgggctttacatcaggtcaaggatttttagggtttctcaaaaataggattcttgtcagtgtatgcatgctgagtaagtcacctttctggctctaatttctgggtggccatctgttgtccagctctgctgccaactggactttccgaaagccatgtcaactaattttttatatgctaagacaaatcgaatatgaaaagaggaagaatattctagatattctaagacatttcttaatttggcatctcagaggaggtaggtggaaagtaaaggaagagataattttgggggaaaatttgtggaaacatacaaaacgttttgctttgtatagatgctaaacagagtgggaggcagcatatttgtaacaacaaccattctgaccttttgaaacacaagcttttggagaagtcagggagagacacagtatgaataaaagcaattaacattttctttaatgtatatttttcaaagaggaccackgaatcctgttctctaacccaaggggcagtgtaggtggttttaagcccacagaatattgagatatttctcttgtggttttggtggggtggtgggatgcagaaggttattaaagatcaatttaagcatcagatagactatcccttttatttttttaacttttaggttcargggtacatgtgcaggttgttatataggtaaactcatgtcaagtggttttgttgtacagattattttgtcacccaggtgctaagcctagtacccagtagttattttccctgctcttctccctcctcccaccctccaccctcaagtaggccccagtgtctgttgttcctttctttgtgtccttgagttctcatcatttagctcctacttctaaatgagaacatgtatttggttttctgttctgtgttagtttgctaaggataatggcctccagctcagatggaatatctctatcatatagacctgttgttacagggcaggatcggatgatggacactgaagtcctcagcttgctaagttcagttgctctccctagcctccttttggcttcagagtcttttgattccatctatcctggtattttttgtgtgctgatgtttagttctggattggcttcagctgtgctaataggaagggcgttgtcttttcaagcaatcttaaaaggtggtcaatcaaaaggccagagtctgaatcccttctgtggcttaaataatttgaggatcaagtccagtgtcttgttaatccctgttctactgtgccagacactatcttgaatgcttttatatgttcaggttcaaaatcgctctttcataccaggggatgatagtaacgtgtaacttgcaatagattccttcatcttagtaataagatgatcagtctagttaggacaaaatagagattgaataaattaacttttccaagtttacagagtaaaaatgagcagatctctgcctggttttgtgaaaaagagttagcactggtaaatagaatatttctactcctacaccattctttcagtatatcatcactgaagacaggaagataggcacacagattcttcctcgtagtaattcatagtgcactaggtgaaagagatgaagtatgtattaaaagtacaatgtgatggcatttattattcagataatcccaggattctagaagaaaataaagaagagtgacagttcagttagggtgtgaacttccagaggagcactgcttaagctgaacttgagagcattgtgcaaaagcacagtagtctgttaagaactagaaataacctagcttgtgccacttcgggagtattaagacataagcctagaaaggtaggcaaaggttagatcttagactgtcttgtatttttctcattcctgttgattacctacctcaaaattgaatatgtttttcctcctgcctaacacaaaactacycaagggcagaaatttaaattcttccttggtgtatgtgcaaagaaggttgaatatattcatgcctaccttattttggactaggaatacagtagtatactttccgaagacttgcctgaatagtatataaggtggaggcaactgactagttaggtcagtatttttagaaactcttaatagctcatactcttgataccaaaagcagccctgattgttaaagcacacacctgcacaagaagcagtgatggttgcatttacatttcctgggtgcacaaaaaaaaattctcaaaaagcaaggacttacgctttttgcaaagcctttgagaagttactggatcataggaagcttataacaagaatggaagattcttaaataactcactttctttggtatccagtaacagtagatgttcaaaatatgtagctgattaataccagcattgtgaacgctgtacaaccttgtggttattactaagcaagttactactagcttctgaaaagtagcttcataattaatgttatttatacactgccttccatgacttttactttgccctaagctaatctccaaaatctgaaatgctactccaatatcagaaaaaaagggggaggtggaattatatttcctgtgattttaagagtacagagaatcatgcacatctctgattagttcatatatgtctagtgtgtaataaaagtcaagatgaactctcaaaaaaaaaaaaaaaaggggggcggtctaaaagtttccttgaggc

SEQ ID NO: 98 - DNA, 1192 bp, Homo sapiens
  misc_feature (1136)..(1136): n equals a,t,g, or c
tggaccgggtccggaattcccgggatatcgtcgacccacgcgtccgggggaagcagatctgaggacatctctgtgccaggccagaaaccgcccacctgcaggtgaggcccggacccctgcccagttccttctccgggatggacgtggggcccagctccctgccccaccttgggctgaagctgctgctgctcctgctgctgctgcccctcaggggccaagccaacacaggctgctacgggatcccagggatgcccggcctgcccggggcaccagggaaggatgggtacgacggactgccggggcccaagggggagccaggaatcccagccattcccgggatccgaggacccaaagggcagaagggagaacccggcttacccggccatcctgggaaaaatggccccatgggaccccctgggatgccaggggtgcccggccccatgggcatccctggagagccaggtgaggagggcagatacaagcagaaattccagtcagtgttcacggtcactcggcagacccaccagccccctgcacccaacagcctgatcagattcaacgcggtcctcaccaacccgcagggagattatgagacgagcactggcaagttcacctgcaaagtccccggcctctactactttgtctaccacgcgtcgcatacagccaacctgtgcgtgctgctgtaccgcagcggcgtcaaagtggtcaccttctgtggccacacgtccaaaaccaatcaggtcaactcgggcggtgtgctgctgaggttgcaggtgggcgaggaggtgtggctggctgtcaatgactactacgacatggtgggcatccagggctctgacagcgtcttctccggcttcctgctcttccccgactagggcgggcagatgcgctcgagccccacgggccttccacctccctcagcttcctgcatggacccaccttactggccagtctgcatccttgcctagaccattctccccaccagatggacttctcctccagggagcccaccctgacccacccccactgcaccccctccccatgggttctctccttcctctgaacttctttaggagtcactgcttgtgtggttcctgggacacttaaccaatgccttctggtactgccattctttntttttttttttcaagtattggaaggggtggggagatatataaataaatcatgaaat

SEQ ID NO: 99 - DNA, 1230 bp, Homo sapiens
  misc_feature (1076)..(1076): n equals a,t,g, or c
ccacgcgtccggcgggccgaggactccagcgtgcccaggtctggcatcctgcacttgctgccctctgacacctgggaagatggccggcccgtggaccttcacccttctctgtggtttgctggcagccaccttgatccaagccaccctcagtcccactgcagttctcatcctcggcccaaaagtcatcaaagaaaagctgacacaggagctgaaggaccacaacgccaccagcatcctgcagcagctgccgctgctcagtgccatgcgggaaaagccagccggaggcatccctgtgctgggcagcctggtgaacaccgtcctgaagcacgtcatctggctgaaggtcatcacagctaacatcctccagctgcaggtgaagccctcggccaatgaccaggagctgctagtcaagatccccctggacatggtggctggattcaacacgcccctggtcaagaccatcgtggagttccacatgacgactgaggcccaagccaccatccgcatggacaccagtgcaagtggccccacccgcctggtcctcagtgactgtgccaccagccatgggagcctgcgcatccaactgctgcataagctctccttcctggtgaacgccttagctaagcaggtcatgaacctcctagtgccatccctgcccaatctagtgaaaaaccagctgtgtcccgtgatcgaggcttccttcaatggcatgtatgcagacctcctgcagctggtgaaggtgcccatttccctcagcattgaccgtctggagtttgaccttctgtatcctgccatcaagggtgacaccattcagctctacctgggggccaagttgttggactcacagggaaaggtgaccaagtggttcaataactctgcagcttccctgacaatgcccaccctggacaacatcccgttcagcctcatcgtgagtcaggacgtggtgaaagctgcagtggctgctgtgctctctccagaagaattcatggtcctgttggactctgtgcttcctgagagtgcccatcggctgaagtcaagcatcgggctgatcaatgaaaaggctgcagataagctgngatctacccagatcgtgaagatcctaactcaggacactcccgagttttttatagaccaaggccatgccaaggtggcccaactgatcgtgctggaagtgtttccctccagtgaagccctccgccctttgttcaccctgggcatcgaagccagctc

SEQ ID NO: 100 - DNA, 1058 bp, Homo sapiens
ccacgcgtccgattcatctgactctagtgaaagtccaacagccactccctttttggcctccaactgggcaccatgagggcctgcatctccctggtattggccgtgctgtgtggcctggcctgggctggaaaaatagaatcctgtgcatctcgatgtaatgagaaatttaaccgggacgctgcctgccagtgtgaccgccggtgtctctggcatgggaactgctgtgaagactatgaacatctgtgtactgaggaccacaaagagtcagagccattgccacagctggaggaagagacagaagaggccctcgccagcaacttgtactcggcacccacctcctgccagggccgctgctacgaagcctttgacaagcaccaccaatgtcactgcaatgcccgctgccaagagtttgggaactgctgcaaggattttgagagcctgtgtagtgaccacgaggtctcccacagcagtgatgccataacaaaagaggagattcagagcatctctgagaagatctacagggcagacaccaacaaagcccagaaggaagacatcgttctcaatagccaaaactgcatctccccgtcagagaccagaaaccaagtggatcgctgcccaaagccactcttcacttatgtcaatgagaagctgttctccaagcccacctatgcagccttcatcaacctcctcaacaactaccagcgggcaacaggccatggggagcacttcagtgcccaggagctggccgagcaggacgccttcctcagagagatcatgaagacagcagtcatgaaggagctctacagcttcctccatcaccagaatcgctatggctcagagcaagagtttgtcgatgacttgaagaacatgtggtttgggctctattcaagaggcaatgaagagggggactcgagtggctttgaacatgtcttctcaggtgaggtaaaaaaaggcaaggttactggcttccataactggatccgcttctacctggaggagaaggagggtctggttgactattacagtcacatctacgatgggccttgggattcttaccc

SEQ ID NO: 101 - DNA, 749 bp, Homo sapiens
ccacgcgtccgctttcagctaaaggggagatctggatggcatctacttcgtatgactattgcagagtgcccatggaagacggggataagcgctgtaagcttctgctggggataggaattctggtgctcctgatcatcgtgattctgggggtgcccttgattatcttcaccatcaaggccaacagcgaggcctgccgggacggccttcgggcagtgatggagtgtcgcaatgtcacccatctcctgcaacaagagctgaccgaggcccagaagggctttcaggatgtggaggcccaggccgccacctgcaaccacactgtgatggccctaatggcttccctggatgcagagaaggcccaaggacaaaagaaagtggaggagcttgagggagagatcactacattaaaccataagcttcaggacgcgtctgcagaggtggagcgactgagaagagaaaaccaggtcttaagcgtgagaatcgcggacaagaagtactaccccagctcccaggactccagctccgctgcggcgccccagctgctgatttgtgctgctgggcctcagcgctctgctgcagtgagatcccaggaagctggcacatcttggaaggtccgtcctgctcggcttttcgcttgaacattcccttgatctcatcagttctgagcgggtcatggggcaacacggttagcgggagagcacggggtagccggagaagggcctgtggagcaggtctggaggggccatggggca

SEQ ID NO: 102 - DNA, 569 bp, Homo sapiens
ccacgcgtccgcggacgcgtgggcggacgcgtggggttgcgatgaaagttctaatctcttccctcctcctgttgctgccactaatgctgatgtccatggtctctagcagcctgaatccaggggtcgccagaggccacagggaccgaggccaggcttctaggagatggctccaggaaggcggccaagaatgtgagtgcaaagattggttcctgagagccccgagaagaaaattcatgacagtgtctgggctgccaaagaagcagtgcccctgtgatcatttcaagggcaatgtgaagaaaacaagacaccaaaggcaccacagaaagccaaacaagcattccagagcctgccagcaatttctcaaacaatgtcagctaagaagctttgctctgcctttgtaggagctctgagcgcccactcttccaattaaacattctcagccaagaagacagtgagcacacctaccagacactcttcttctcccacctcactctmccactgtasccacccctaaatcattccagtgctctcaaaaagcatgtttttcaagatcaaaaaaaaaaaaaaag

SEQ ID NO: 103 - DNA, 1273 bp, Homo sapiens
  misc_feature (901)..(901): n equals a,t,g, or c
  misc_feature (1207)..(1207): n equals a,t,g, or c
ccacgcgtccgctctattctaagtatttcacatgtgtgaactccctggcaggctagtagtattagagcttttgcttattaatctctatggtaacaggtcattaaaaaaaataattaattactgtgttaccaagatcaaaatatagtaatattcgcctcttcagctgtgaccaccaccatagaaaagtccaggcaaaaatacagagatcagaaggggcaagtggaaccctatgcaggctaaagactcttaggaaatatgggcccttgaaatgtccccatctatgtgggtttcattgtcagtccttctttctttggcagggtcaagggcatttgacctgttgatacacctattgcttttccagcaagccctacatctttctagtaaggagtcaatgcaccaaagctggaggccactggaggtgactccagtcaccatttttcaacttctcctagaaatgtctctttggtttcttcaggctttgacttgggtgactatggagaacgtgacatgggaagttaaaaagcaacaagaagtcttttaaaaagtttgaattacattgaacatatgtctgaaatgtaagaaggggtaagccctctttcttaccatccttcctgaccatgacccctgggagtcagatatcccaggcacagcttagctttctaaccctgctgtgttgccctccatgatctctccgaatttctctccctttcctccctttacactaaaaatgctctagttctggccttcctcatctcgttaataattaagctggctgacttaactccctgccttctggttgccctcttcaatctgtccttgtctctgtcagcagcagcatcgtcctgctcaaaaccacaaagacctcctactgtggaaagacaggtattcagaatccacawcngcacgtctagatcccctgtgatgtgccctgaaacaacctccactgtcttagcttttactaacatcttccataatttccaggcccagcaggcctgatcttgtgctcaacttccccaacttagtctcctccttctgtcagaaatagcctttctctatctccacctgagattaatgtatcctggagagtctatctctcttttcagtgtccatatcaagggccggctcctccagaaagcctttctataccttcaacctccaacctcatatctcatcattagaaaagatcacgttctcattagaagcccanacctcagtatcacataatatgcccatctaacaaacctgcacatgtacaccctgaacctaaaaaaaa

SEQ ID NO: 104 - DNA, 681 bp, Homo sapiens
ccacgcgtccgctggttgccatattggccctttggttctgcatatctgtgcctctgacgtttattggtgcatactttggttttaagaagaatgccattgaacacccagttcgaaccaatcagattccacgtcagattcctgaacagtcgttctacacgaagcccttgcctggtattatcatgggagggattttgccctttggctgcatctttatacaacttttcttcattctgaatagtatttggtcacaccagatgtattacatgtttggcttcctatttctggtgtttatcattttggttattacctgttctgaagcaactatacttctttgctatttccacctatgtgcagaggattatcattggcaatggcgttcattccttacgagtggctttactgcagtttatttcttaatctatgcagtacactacttcttttcaaaactgcagatcacgggaacagcaagcacaattctgtactttggttataccatgataatggttttgatcttctttctttttacaggaacaattggcttctttgcatgcttttggtttgttaccaaaatatacagtgtggtgaaggttgactgaagaagtccagtgtgtccagttaaaacagaaataaattaaactcttcatcaacaaagaaaaaaaaaaaaaaaaaaaaaaaaaaaag

SEQ ID NO: 105 - DNA, 1695 bp, Homo sapiens
ccacgcgtccgggcagagccgccagcgaggctggggatgggggcgccgctgctctctcccggctggggagccggggctgccggccggcgctggtggatgctgctggcgcccctgctgccggcgctgctgctggtgcggcccgcgggggccctggtggaggggctctactgcggcacgcgggactgctacgaggtgctgggcgtgagccgctcggcgggcaaggcggagatcgcgcgggcctaccgccagctggcccggcgctaccaccctgaccgctaccggccccagcccggagacgagggccccgggcggacgccgcagagcgccgaggaggctttcctgstggtggcaaccgcctacgagaggatcaaggtctctcaggcagctgcagagcttcaacagtactgtatgcagaatgcctgcaaggatgccctgctggtgggtgttccagctggaagtaaccccttccgggagcctagatcctgtgctttactctgaagactctaggagagaagtttgctgaggaatgccttcaagcacaaagtgatgaatgactgccttcaagtctcaagaaaacacttttccctaacttttagagatatttcagccctttcctgtggcctggtcctatagccaaaatcacagatattcatgagtttctacttgagtgagaaaactgggtgaaggaatagaattttaaatagtaataactgcttgttttttttgtgcaagtacttttatacataagataaacaaaaaccttaccaccaaacataccaaaatgcacctctttcataagtgagttactaagatttctatacctggaatatcatgtatgtttcatttactggatgtttacattttaggaaggaaaatagttytgtttatttaaacaactgaatacttataaactgttgttcctggaagttatttattccataaaaaatttgttcttttstcatgaatttataattcctaaatgaagaccagaaagtacaaattgctgggaggaagaataggctttattaatcaactgatgtcttgatttttctaaatgggaagattgctttatttttaacactaattatgggagcagattcttagcaaacttctttggaaaagttaatgttatgatgtgcattaggctgccccatcgtgtatataaatgaagcagatttgatttttgtattcttacgtttctctgctttgtagttgtggctgtacttaaagaaatacagaatttcatatatttaaaaatgtttaaaatgtgacccacagaacattgtaaatgattaaaaactaacatgaaaatattacaacctaaaagaattcttaacttcacaagtgttttacttcgacgatgtgcctttgatttaatttgggacacttttttagaaggatacattattcgtgtttgcaacggtctttgaagagcttggaaataaaatttctgcttaattaatcatttttctatgacagcaatattttgtgtctgattttgtattaaggactcawggatttctgtttgcctgtgagattgagtgctggaatgagagagtgaaattgttgtttttaagtctttgtagaattttgcaaatgtcctgaaaaatagataactgtataacatgaagaaaatatctctattaatggcaacatttgttctctgraatagctatatwtmactcataaataaac

SEQ ID NO: 106 - DNA, 467 bp, Homo sapiens; identical to SEQ ID NO: 66
  misc_feature (418)..(418): n equals a,t,g, or c

SEQ ID NO: 107 - DNA, 572 bp, Homo sapiens
ccacgcgtccgggagaacatgcagctcggcactgggctcctgctggccgccgtcctgagcctgcagctggctgcagccgaagccatatggtgtcaccagtgcacgggcttcggagggtgctcccatggatccagatgcctgagggactccacccactgtgtcaccactgccacccgggtcctcagcaacaccgaggatttgcctctggtcaccaagatgtgccacataggctgccccgatatccccagcctgggcctgggcccctacgtatccatcgcttgctgccagaccagcctctgcaaccatgactgacggctgccctcctccaggcccccggacgctcagcccccacagcccccacagcctggcgccagggctcacggccgcccctccctcgagactggccagcccacctctcccggcctctgcagccaccgtccagcaccgcttgtcctagggaagtcctgcgtggagtcttgcctcaatctgctgccgtccaagcctggggcccatcgtgcctgccgccccttcaggtcccgacctccccacaataaaatgtgattggatcgtgt

SEQ ID NO: 108 - DNA, 1214 bp, Homo sapiens
aattcggcacgagccagattcccataaagcacatggtctaatctgttacgtaacagcaagacagcgtcacctcacctgttctcgccctcaaatgggaacgctggcctgggactaaagcatagaccaccaggctgagtatcctgacctgagtcatccccagggatcaggagcctccagcagggaaccttccattatattcttcaagcaacttacagctgcaccgacagttgcgatgaaagttctaatctcttccctcctcctgttgctgccactaatgctgatgtccatggtctctagcagcctgaatccaggggtcgccagaggccacagggaccgaggccaggcttctaggagatggctccaggaaggcggccaagaatgtgagtgcaaagattggttcctgagagccccgagaagaaaattcatgacagtgtctgggctgccaaagaagcagtgcccctgtgatcatttcaagggcaatgtgaagaaaacaagacaccaaaggcaccacagaaagccaaacaagcattccagagcctgccagcaatttctcaaacaatgtcagctaagaagctttgctctgcctttgtaggagctctgagcgcccactcttccaattaaacattctcagccaagaagacagtgagcacacctaccagacactcttcttctcccacctcactctcccactgtacccacccctaaatcattccagtgctctcaaaaagcatgtttttcaagatcattttgtttgttgctctctctagtgtcttcttctctcgtcagtcttagcctgtgccctccccttacccaggcttaggcttaattacctgaaagattccaggaaactgtagcttcctagctagtgtcatttaaccttaaatgcaatcaggaaagtagcaaacagaagtcaataaatatttttaaatgtcacagatcaaaattgtttccttcaaatggggtctgccaattcacaaccagatgacccattttaccctattcactgcagactgaatccagattytacacatacttatccccmccaagaccctcactctgtctccattggcctacttgttcatctttcactcattcgacaaatctttytgaggtaagagcgaggtgggrcaaaaaaaaaaagcataccaatgaaccagacmcggtcttattaaagataatataggtttaaaaaaaaaaaaaaaaaaaaaaaaaaa

SEQ ID NO: 109 - DNA, 1647 bp, Homo sapiens
aagttctagggcggaagtggccgagaggagaggagaatggcggcggaaggctggatttggcgttggggctggggccggcggtgcctgggaaggcctgggcttctcggccccggccctggccccactacacctctctttcttcttttgttgttggggtctgtgactgcggatataactgacggcaacagtgaacatctcaagcgggagcattcgctcattaagccctaccaaggggtcggttccagctctatgcccctctgggacttccagggcagcactatgctcacgagccagtacgtacgtctgacccctgacgagcgcagcaaagagggctctatctggaaccaccagccgtgcttcctcaaagactgggaaatgcacgtccacttcaaagtccacggcacagggaagaagaacctccatggagacggcatcgccttgtggtacacccgggaccgcctcgtgccagggcctgtgtttggaagcaaagataacttccacggcttagccatcttcctggacacctaccccaatgatgagaccactgagcgcgtgttcccgtacatctcggtgatggtgaacaatggctccctgtcctacgaccacagcaaggatgggcgctggaccgagctggcgggctgcacggctgacttccgcaaccgcgatcacgacaccttcctggctgtgcgctactcccggggccgtctgacggtgatgaccgacctggaggacaagaacgagtggaagaactgcattgacatcacgggagtgcgcctgcccaccggctactacttcggggcctccgccggcaccggcgacctgtctgacaatcatgacatcatctccatgaagctgttccagctgatggtggagcacacgcccgacgaggagagcatcgactggaccaagatcgagcccagcgtcaacttcctcaagtcgcccaaagacaacgtggacgaccccacggggaacttccgcagcgggcccctgacggggtggcgggtgttcctgctgctgctgtgcgctctcctgggcatcgttgtctgcgccgtggtgggggccgtggtgttccagaagcggcaggagcggaacaagcgcttctactgagtggcgcctccggcggggcctgtccctgggcccaggagccaatgtgaacttttttttttaccgggattataaaagaacaacaagatgaccttatttcttaactgtttcaaataaatgattaaagtattttcatacattttgcttcttgcccagcagggacaggtggcagagccgaggcttagggtctggcaccccccacagctggagacggaggctctcctggggctggtgtctcaggagcaggggtctgtgtctacagatgggctgtggcccctgcaggcagctgttgaacactggagggtcccccggaccacactggggtgggctcctgaggacgtggggaagtgattttgttttgtggtgtgtggcacgtgtggcgacggataaggcctgaactgggaaaccaggccttcctgttmacggatgttccgaaaatgcaatgaggtacggcggtggggccggtgacctgtaaaagatacaccagaaaaaacgctttgggcaagaaggaggtttcaccttgaagggtgccagtttcgcaac

SEQ ID NO: 110 - DNA, 605 bp, Homo sapiens
gcatctttcccctcgccctctgttgctcctgttttcaccatgtgacatgcctgctcctgctttgcctgctgccatgagtaaaagttccctgacgcctctccagaagctaagcagatgccagcaccatgcttcctgtacaacctgcagaacttattggctggagttggcgatgactcagcagatcaaggctggaagactcattctcgtcaggtggttgacgttggctgtcagttggaacctcacctggggctgtttgccagaacacctacacatggcatgtccatggagctatttgacttcctcactgcaatggctgggttccaagagcagttatcccaagagaacaaggcagaagtgcatgacttttagaatcttgtctcacaagtcacacagagtcacttccaccatcccctgttggtcaaggaggacatgaaggtcttcctaggagcacggggagaagacagacttctaccacctgttggaaggagtgtcagtgttacatagcaagagaagcacatggaatgggatgtattgtgatgcccatctttggaacagacaatttggcatatctgtgaaaattaaaagtctgatttggatataacaaa

SEQ ID NO: 111 - DNA, 956 bp, Homo sapiens
  misc_feature (942)..(942): n equals a,t,g, or c
  misc_feature (945)..(945): n equals a,t,g, or c
  misc_feature (947)..(947): n equals a,t,g, or c
ccacgcgtccggctctgcgagctggatgtccaggctgcgggcgctgctgggcctcgggctgctggttgcgggctcgcgcctgccgcggatcaaaagccagaccatcgcctgtcgctcgggacccacctggtggggaccgcagcggctgaactcgggtggccgctgggactcagaggtcatggcgagcacggtggtgaagtacctgagccaggaggaggcccaggccgtggaccaggagctatttaacgaataccagttcagcgtggaccaacttatggaactggccgggctgagctgtgctacagccatcgccaaggcatatccccccacgtccatgtccaggagcccccctactgtcctggtcatctgtggcccggggaataatggaggagatggtctggtctgtgctcgacacctcaaactctttggctacgagccaaccatctattaccccaaaaggcctaacaagcccctcttcactgcattggtgacccagtgtcagaaaatggacatccctttccttggggaaatgcccgcagagcccatgacgattgatgaactgtatgagctggtggtggatgccatctttggcttcagcttcaagggcgatgttcgggaaccgttccacagcatcctgagtgtcctgaagggactcactgtgcccattgccagcatcgacattccctcaggatgggacgtggagaagggaaatgctggagggatccagccagacttgctcatctccctcacagcccccaaaaaatctgcaacccagtttaccggtcgctaccattacctggggggtcgttttgtgccacctgctctggaaaagaagtaccagctgaacctgccaccctaccctgacactgagtgtgtctatcgtctgcagtgagggaaggtgggtgggtattctccccaataaagacttagagcccctctcanaananaaaaaaaaa

SEQ ID NO: 112 - DNA, 1178 bp, Homo sapiens
ccacgcgtccgagcattttcttcctcacgtgcatgagcgtggaccgctacctctccatcacctacttcaccaacacccccagcagcaggaagaagatggtacgccgtgtcgtctgcatcctggtgtggctgctggccttctgcgtgtctctgcctgacacctactacctgaagaccgtcacgtctgcgtccaacaatgagacctactgccggtccttctaccccgagcacagcatcaaggagtggctgatcggcatggagctggtctccgttgtcttgggctttgccgttcccttctccattatcgctgtcttctacttcctgctggccagagccatctcggcgtccagtgaccaggagaagcacagcagccggaagatcatcttctcctacgtggtggtcttccttgtctgctggctgccctaccacgtggcggtgctgctggacatcttctccatcctgcactacatccctttcacctgccggctggagcacgccctcttcacggccctgcatgtcacacagtgcctgtcgctggtgcactgctgcgtcaaccctgtcctctacagcttcatcaatcgcaactacaggtacgagctgatgaaggccttcatcttcaagtactcggccaaaacagggctcaccaagctcatcgatgcctccagagtctcagagacggagtactctgccttggagcagagcaccaaatgatctgccctggagaggctctgggacgggtttacttgtttttgaacagggtgatgggccctatggttttctagagcaaagcaaagtagcttcgggtcttgatgcttgagtagagtgaagaggggagcacgtgccccctgcatccattctctctttctcttgatgacgcagctgtcatttggctgtgcgtgctgacagttttgcaacaggcagagctgtgtcgcacagcagtgctgtgcgtcagagccagctgaggacaggcttgcctggacttctgtaagataggattttctgtgtttcctgaattttttatatggtgatttgtatttaaattttaagactttattttctcactattggtgtaccttataaatgtatttgaaagttaaatatattttaaatattgtttgggaggcatagtgctgacatatattcagagtgttgtagttttaaggttagcgtgacttcagt

SEQ ID NO: 113 - DNA, 1041 bp, Homo sapiens
  misc_feature (910)..(910): n equals a,t,g, or c
  misc_feature (939)..(939): n equals a,t,g, or c
  misc_feature (944)..(944): n equals a,t,g, or c
ccacgcgtccggtgctccagagctctgtcccagccccttctctctctgaactctctggaggtgacctgtgccctcccagactctgtctcccatctgcatcatggccatgtccagtggttgtctccaactctttctgctccttggacttgagactcaaaggtctgcctgcctccttgacatttcccctagacatccagtggaaggaagctacagcttcccgcccacagcacccagacccagtcctcctctgtcatcccagttctgcaagggggcatctccagccacctacagccccactggtccaagccacaaatggtgcctctgggccctgagcttcctcaccatgtccagtcccattgaggtcctcagctcttaccgcactggcccccatccctcacctggacgcttgcctcctcacttgccccccattcttggagaagccagagcaaccttgaagtcacacccatcgcttcttggtcttttggctaagatcaggtgtaaaagccacacccacctctgccccttatccacgcgggatgaacccaggaggacgggcagggcaggggacaagtcctgagggccttgaatgccaagctgagtgctgaggacagccagagaggttttgtttttgtttttgcagagggggtgggacaagtttcaatttgagaaagatggcctggttgcagggagacacagtgaaggggccccggtgggcagcaggcagtgggacccacagctggcctctgctcctccattgctctttcggccccaactcttcccttcccagctgaccttggcaccccgcttcctgccaaacgccctgatcagtgtggactttgctgccaactatctcaccaagatctatgggctcacctttggccagaagccaaacttgaggtcagaggtcggnggtggtcagggctcgggctggggcaaggngaggngctgaagtggaggctgccatcctgtgtgaggcagagacaggtccccgaaggagccctgcactcagggctgtggtggagggacacccaggggccccta

SEQ ID NO: 114 - DNA, 729 bp, Homo sapiens
ccacgcgtccgagcggaagcacagctcagagctggtctgccatggacatcctggtcccactcctgcagctgctggtgctgcttcttaccctgcccctgcacctcatggctctgctgggctgctggcagcccctgtgcaaaagctacttcccctacctgatggccgtgctgactcccaagagcaaccgcaagatggagagcaagaaacgggagctcttcagccagataaaggggcttacaggagcctccgggaaagtggccctactggagctgggctgcggaaccggagccaactttcagttctacccaccgggctgcagggtcacctgcctagacccaaatccccactttgagaagttcctgacaaagagcatggctgagaacaggcacctccaatatgagcggtttgtggtggctcctggagaggacatgagacagctggctgatggctccatggatgtggtggtctgcactctggtgctgtgctctgtgcagagcccaaggaaggtcctgcaggaggtccggagagtactgagaccgggaggtgtgctctttttctgggagcatgtggcagaaccatatggaagctgggccttcatgtggcagcaagttttcgagcccacctggaacacattggggatggctgctgcctcaccagagagacctggaaggatcttgagaacggccagttctcccgaaatccaatggaacgacagcccccttccttgga

SEQ ID NO: 115 - DNA, 495 bp, Homo sapiens
ccacgcgtccgtcctgctgggcggactcttcatctacgatgtcttctgggtatttggcaccaatgtgatggtgacagtggccaagtccttcgaggcaccaataaaattggtgtttccccaggatctgctggagaaaggcctcgaagcaaacaactttgccatgctgggacttggagatgtcgtcattccagggatcttcattgccttgctgctgcgctttgacatcagcttgaagaagaatacccacacctacttctacaccagctttgcagcctacatcttcggcctgggccttaccatcttcatcatgcacatcttcaagcatgctcagcctgccctcctatacctggtccccgcctgcatcggttttcctgtcctggtggcgctggccaagggagaagtgacagagatgttcagttatgaggagtcaaatcctaaggatccagcggcagtgacagaatccaaagagggaacagaggcatcagcatcgaaggg

SEQ ID NO: 116 - DNA, 1701 bp, Homo sapiens
ccacgcgtccggggatttgaacacctgaagctccccatcaagggaatgaacttcacatggaagacttataaccctgccttctcccggttggaaatctggttccggtttttctttgtggtgctcaccttcatcgtcacttgcctgtttgcgcattccctccggaaattttccatgagagactggggcatcgagcagaagtggatgtctgttctcctgcctctgctgctactttacaatgatccgttcttccccctctccttcctggtcaacagctggctcccagggatgctggatgacctctttcagtccatgttcctgtgcgccctgctgctcttctggctgtgcgtgtaccacgggattcgtgtccagggagaaagaaagtgtttaactttctatttgcctaaattcttcattgttggactattgtggttggcttctgttacgctaggaatatggcaaacagttaacgaattacatgatccaatgtaccagtatcgagttgataccggaaattttcagggaatgaaggtcttcttatggtggtggcagcggtgtacattctgtacctcttgttcttgatagtgcgggcgtgttccgagctacgtcacatgccttatgtggatctcaggttgaaatttttgactgcattgactttcgtagtacttgtcattagagtcccagctgaaagacaatcctgccttctccatgctgaatgactcggatgatgatgtgatttatgggagtgactatgaggaaatgccgctgcagaacggccaggccatccgggccaagtacaaggaggagtcagatagtgactgagccccggccagcccagcgaggcgacaagatgcctggatgctttccccggtgaccgtctgytgaccttcccctgttatattcagatttttcttacaagcagagatttcctgttcatttgtttacatatttttttaaaggaaaaccaaaactgagggtaaatttaaatgtttagccaaatttattgtcatggtggctacgagaagaggcattgataacaagtttcaacagccaaatccttttttacagagatttcagatgagcgtgttttcagtgatgaggaaatttcacgtttttagtacagtgaattatgtacttttttttcctgtaatcattcactgattccaagttcacgggcagcctgtgactaggtcctcagcgtgacagcatcaccctctttcttcccttttccatggtactgttttgtgaccctttaaactcaaagggaagccttatctgtggctgcttcagggcagtccttcctcgttgagtggccagtgccctgggtaaccaggtggctgaagtgattggtcagttatgtggactgcgttttgtgcagtgtgtgagttatgactcatcgggaatgggagatgctggggttccaacccttcacgtcaccaaaggggaagtaatagtgtggagttctgaggagggtttgataagttgaataaggaaaggctaagataatttacaggttaccaactcatgtggggaaggtcttactgccatggtgcttttcaggggcctgtgtgtacacacatgattaaatggatttgcctgtgggaggtatgggcaggagaggaacccttaccattccagtaaatagcagtttctgcaattctgttgaatatgaaatgccatagagctttatttatttatgtaagt

SEQ ID NO: 117 - DNA, 410 bp, Homo sapiens
ccacgcgtccggccgctgccaccgcaccccgccatggagcggccgtcgctgcgcgccctgctcctcggcgccgctgggctgctgctcctgctcctgcccctctcctcttcctcctcttcggacacctgcggcccctgcgagccggcctcctgcccgcccctgcccccgctgggctgcctgctgggcgagacccgcgacgcgtgcggctgctgccctatgtgcgcccgcggcgagggcgagccgtgcgggggtggcggcgccggcggggggtactgcgcgccgggcatggagtgcgtgaagagccgcaagaggcggaggggtaaagccggggcagcagccggcggtccgggtgtaagcggagtgtgcgtgagcaagaaccactacccggggagcggcagcgacttgaccca

SEQ ID NO: 118 - DNA, 980 bp, Homo sapiens
ccacgcgtccgatctggatggcatctacttcgtatgactattgcagagtgcccatggaagacggggataagcgctgtaagcttctgctggggataggaattctggtgctcctgatcatcgtgattctgggggtgcccttgattatcttcaccatcaaggccaacagcgaggcctgccgggacggccttcgggcagtgatggagtgtcgcaatgtcacccatctcctgcaacaagagctgaccgaggcccagaagggctttcaggatgtggaggcccaggccgccacctgcaaccacactgtgatggccctaatggcttccctggatgcagagaaggcccaaggacaaaagaaagtggaggagcttgagggagagatcactacattaaaccataagcttcaggacgcgtctgcagaggtggagcgactgagaagagaaaaccaggtcttaagcgtgagaatcgcggacaagaagtactaccccagctcccaggactccagctccgctgcggcgccccagctgctgattgtgctgctgggcctcagcgctctgctgcagtgagatcccaggaagctggcacatcttggaaggtccgtcctgctcggcttttcgcttgaacattcccttgatctcatcagttctgagcgggtcatggggcaacacggttagcggggagagcacggggtagccggagaagggcctctggagcaggtctggaggggccatggggcagtcctgggtgtggggacacagtcgggttgacccagggctgtctccctccagagcctccctccggacaatgagtcccccctcttgtctcccaccctgagattgggcatggggtgcggtgtggggggcatgtgctgcctgttgttatgggttttttttgcggggggggttgcttttttctggggtctttgagctccaaaaaataaacacttcctttgagggagagcaaaaaaaaaaaaaaaaaaaaaaaag

SEQ ID NO: 119 - DNA, 859 bp, Homo sapiens
ccacgcgtccggccgcctgcaccgctatgatgtattctgcttcgctactgccctcaaggggcgggtgtactacctggagcaccctgagaagctgacgctgacagaggcaagggaggcctgccaggaagatgatgccacgatcgccaaggtgggacagctctttgccgcctggaagttccatggcctggaccgctgcgacgctggctggctggcagatggtagcgtccgctaccctgtggttcacccgcatcctaactgtgggcccccagagcctggggtccgaagctttggcttccccgacccgcagagccgcttgtacggtgtttactgctaccgccagcactaggacctggggccctcccctgccgcattccctcactggctgtgtatttattgagtggttcgttttcccttgtgggttggagccattttaactgtttttatacttctcaatttaaattttctttaaacatttttttactattttttgtaaagcaaacagaacccaatgcctccctttgctcctggatgccccactccaggaatcatgcttgctcccctgggccatttgcagttttgtgggcttctggagggttccccgccatccaggctggtctccctcccttaaggaggttggtgcccagagtgggcggtggcctgtctagaatgccgccgggagtccgggcatggtgggcacagttctccctgcccctcagcctgggggaagaagagggccttggggccctccggagctggcctttgggcctctcctgccacctctactttctgtgaagccgttgaccccagtctgcccactgagggggctagggctggaaagcagttctaggcttccagcgaa

SEQ ID NO: 120 - DNA, 444 bp, Homo sapiens
  misc_feature (424)..(424): n equals a,t,g, or c
ccacgcgtccgcgctgccaccgcaccccgccatggagcggccgtcgctgcgcgccctgctcctcggcgccgctgggctgctgctcctgctcctgcccctctcctcttcctcctcttcggacacctgcggcccctgcgagccggcctcctgcccgcccctgcccccgctgggctgcctgctgggcgagacccgcgacgcgtgcggctgctgccctatgtgcgcccgcggcgagggcgagccgtgcgggggtggcggcgccggcagggggtactgcgcgccgggcatggagtgcgtgaagagccgcaagaggcggaggggtaaagccggggcagcagccggcggtccgggtgtaagcggcgtgtgcgtgtgcaagagccgctacccggtgtgcggcagcgacggcaccacctacccgagcggctgncagctgcgcgccgccagcca

SEQ ID NO: 121 - DNA, 1244 bp, Homo sapiens
ccacgcgtccggaatgaatgtgtatttctttgtctctttctttcttgtctttgctctttgttctctatctaaagtgtgtcttacccatttccatgtttctcttgctaatttctttcgtgtgtgcctttgcctcattttctctttttgttcacaagagtggtctgtgtcttgtcttagacatatctctcatttttcattttgttgctatttctctttgctctcctagatgtggctcttctttcacgctttatttcatgtctcctttttgggtcacatgctgtgtgctttttgtccttttcttgttctgtctacctctcctttctctgcctacctctcttttctctttgtgaactgtgattatttgttaccccttccccttctcgttcgttttaaatttcaccttttttctgagtctggcctcctttctgctgtttctactttttatctcacatttctcatttctgcatttcctttctgcctctcttgggctattctctctctcctcccctgcgtgcctcagcatctcttgctgtttgtgattttctatttcagtattaatctctgttggcttgtatttgttctctgcttcttccctttctactcacctttgagtatttcagcctcttcatgaatctatctccctctctttgatttcatgtaatctctccttaaatatttctttgcatatgtgggcaagtgtgtgtgtgtgtgtgttgtttctttttttttttttacagtatccaaaaatagccctgcaaaaattcagagtccttgcaaaattgtctaaaatgtcagtgtttgggaaattaaatccaataaaaacattttgaagtgtgaaaaaaaaaaaaaaaaaaaaaaaaaaaaaaaaaaaaaaaaaaaaaaaaaaaaaataaaaaaaaaaaaaaaaaaaaaaaaaaaaaaaaaaaaaaaaaaaaaaaaaaaaaaaaaaaaaaaaaaaaaaaaaaaaaaaaaaaaaatttttgggcccccttggcccaatttttttttaatttgaaaaatttttttttttgggcccaaatttgggcttatttggccaatttccccttaaggggggggtttaaaaaataaagggggcgggttttaaaaaggggggaggggaaaaaacctggggttaccaaaataaaagggttttgaaaaaaacccctttttccaagggggggaaaaaaaaaaaaggccccaaacaattcccttttcaaaaaatttcccccccctaatggggaaag

SEQ ID NO: 122 - DNA, 764 bp, Homo sapiens
ccacgcgtccggaagaggccgcgtggggcgaaggcggcgcttggctggtggggcccgcggcgggattttcccgggcggcgagagcggatctatcttgggatcccatggctttctttactgggctctggggccccttcacctgtgtaagcagagtgctgagccatcactgtttcagcaccactgggagtctgagtgcgattcagaagatgacgcgggtacgagtggtggacaacagtgccctggggaacagcccataccatcgggctcctcgctgcatccatgtctataagaagaatggagtgggcaaggtgggcgaccagatactactggccatcaagggacagaagaaaaaggcgctcattgtggggcactgcatgcctggcccccgaatgacccccagatttgactccaacaacgtggtcctcattgaggacaacgggaaccctgtggggacacgaattaagacacccatccccaccagcctgcgcaagcgggaaggcgagtattccaaggtgctggccattgctcagaactttgtgtgagttgagcccaggcctctggttgcaggactcgtgaatggagcagttctgagaaccacccttttgctaaggragcttgggagcccatggctgctcccttcacactgggtaacagtgtagtatcctgtgagagaataaatgtattcatttatgtgtttttccagagctttctgggatgtgggaaaataaattacactgaagcagttgaaaaaaaaaaaaaaaaag

SEQ ID NO: 123 - DNA, 743 bp, Homo sapiens
ccacgcgtccgcagcttcaggcgtctgggctgtggccactgaggaaagagatcctgctctggggacttccagtctgagtatcagaggagaagaggctcgggaggttttgcggggggatagaggaggtggggatggagcctttccttcagagctgccagtttcagagtagaagagctggagttctgctttgggtccctcagtctgggttcaaggaaagagggggaggcaggttttttgatccagtgctgtccccacccccacccctgtgctgttgaggatgcagaaagaccctccctagggcccctctggcctcccaggcatggctcaccttctcctctgctctcccwgccagctttacctgctgttcctgagccttacgctggccactgtcaacgcccgctggctggaaccccgcaccacagctgccatgtgggccctgcaaaccgtggagaaggagcgaggcctgggtggggaggtaccaggcagccaccagggtcccgatccctaccgccagctgcgagagaaggaccccaagtacagtgctctccgccagaatttcttccgctaccatgggctgtcctctctttgcaatctgggctgcgtcctgagcaatgggctctgtctcgctggccttgccctggaaataaggagcctctagcatgggccctgcatgctaataaatgcttcttcagaaaaaaaaaaaaaaaaaaaaaaaaaaaaaaaaaaaaaaaaagggcggccgc

SEQ ID NO: 124 - DNA, 478 bp, Homo sapiens
  misc_feature (468)..(468): n equals a,t,g, or c
  misc_feature (470)..(470): n equals a,t,g, or c
gcccacgcgtccgccaaacttgacgccatgaagatcccggtccttcctgccgtggtgctcctctccctcctggtgctccactctgcccagggagccaccctgggtggtcctgaggaagaaagcaccattgagaattatgcgtcacgacccgaggcctttaacaccccgttcctgaacatcgacaaattgcgatctgcgtttaaggctgatgagttcctgaactggcacgccctctttgagtctatcaaaaggaaacttcctttcctcaactgggatgcctttcctaagctgaaaggactgaggagcgcaactcctgatgcccagtgaccatgacctccactggaagagggggctagcrtgagcgctgattctcaacctaccataactctttcctgcctcaggaactccaataaaacattttccatccaaaaaaaaaaaaaaaaaggggsgsccttttaagagaatccntnggggggcc

SEQ ID NO: 125 - DNA, 972 bp, Homo sapiens
  misc_feature (771)..(771): n equals a,t,g, or c
  misc_feature (933)..(933): n equals a,t,g, or c
  misc_feature (942)..(942): n equals a,t,g, or c
  misc_feature (961)..(961): n equals a,t,g, or c
  misc_feature (964)..(964): n equals a,t,g, or c
ccacgcgtccrgcaatatgcatcttgcacgtctggtcggctcctgctccctccttctgctactgggggccctgtctggatgggcggccagcgatgaccccattgagaaggtcattgaagggatcaaccgagggctgagcaatgcagagagagaggtgggcaaggccctggatggcatcaacagtggaatcacgcatgccggaagggaagtggagaaggttttcaacggacttagcaacatggggagccacaccggcaaggagttggacaaaggcgtccaggggctcaaccacggcatggacaaggttgcccatgagatcaaccatggtattggacaagcaggaaaggaagcagagaagcttggccatggggtcaacaacgctgctggacaggttgggaaggaggcagacaaactgatccatcatggggtccatcacggggccaaccaggcgggaagtgaggcagggaagtttggccagggagtcgacaatgctgcagggcaggctggaaatgaggctgggaggtttggccagggagtccaccatgctgcagggcaggccggaaatgaggctgggaggtttggccagggagtccaccatgctgcagggcaggccggaaatgaggctgggagatttggccagggggcccaccatggtctcagtgagggctggaaggagacagagaagtttggccaggggatccaccatgctgccggtcaggttgggaaggaagcagagaagtttggccaggggcccaccatgctgcggggcangccggaaatgaaggcaggagatttggccaggggtccaccatggtctcatgaaggctggaaggagacagagagtttggccaggggtccaccatactgctggtcagtttggaaagaagcaaaaagtttggccagggggccaccatgctgcgggcagccggaatnagcaggagnttggccaggggcccaccanctngggcagcg

SEQ ID NO: 126 - DNA, 561 bp, Homo sapiens
  misc_feature (546)..(546): n equals a,t,g, or c
  misc_feature (548)..(548): n equals a,t,g, or c
  misc_feature (550)..(550): n equals a,t,g, or c
  misc_feature (557)..(557): n equals a,t,g, or c
  misc_feature (559)..(559): n equals a,t,g, or c
gcggcggcggccgggaggccgtgaggagagcggcggctgcgagggcggccgatggcggccgggaggcgccctcggacacttgcgggtcgttagggcgcgacgctgggaggcatgtcggagcacgtggagcccgcagctccggggcccgggcccaacggcggcggcggcggcccggcccccgcgcgcgggcctcgcacccccaatctcaaccccaaccccctcatcaacgtgcgcgaccggctcttccacgcgctgttcttcaagatggctgtcacctattcgcggctcttcccgcccgccttccgccgtctcttcgagttcttcgtgctgctcaaggccctgtttgtgctcttcgtcctggcctacatccacatcgtcttctcccgctcgcccatcaactgcctggagcacgtgcgtgacaagtggccgcgtgagggcatcctgcgtgtggaagtgcggcacaactcgagccgcgcgcccgtcttcctacagttctgtgacagcggcggccggttctaaaaaggatcccaagctttacgtaccgcntngnattgccnangg

SEQ ID NO: 127 - DNA, 1433 bp, Homo sapiens
gggcatttggtgtggggttgatcagaggaattttggaaaggcttggaaacattcctatgtatgtgagacacacctatgccagggcaaagactccaagctcaagtttttctcttgccttctagtcacaagaacatggctttggagtgtgacactggcctaggaatccatgactcccaaaggacggggctaggggtagaggaggttcaggcaaagcccttagattttggagacatcaggcagatgtctccaaaaatgattgtgatcaagaatctgaattataagattcacagtctgctccccaacccagtgctgccaactgtacagctgcgcctccacgaaggggcatatgccaggctcgtctgaccctggaatgaggatgtaggaagcaggcagagctccggttcagccctcacaatgggacygaagcaggagagaaggctgggcagaagggctgtggggaagtagggcttgtctccatggatgacgtccagaaggatgtcaggaggaggaatatcacaggagttatagacattggagggaacagagactggcacaggacctcttcattgcaggaagatggtagtgtaggcaggtaacattgagctcttttcaaaaaaggagagctcttcttcaagataaggaagtggtagttatggtggtaacccccggctatcagtccggatggttgccacccctcctgctgtaggatggaagcagccatggagtgggagggaggcgcaataagacacccctccacagagcttggcatcatgggaagctggttctacctcttcctggctcctttgtttaaaggcctggctgggagccttccttttgggtgtctttctcttctccaaccaacagaaaagactgctcttcaaaggtggagggtcttcatgaaacacagctgccaggagcccaggcacagggctgggggcctggaaaaaggagggcacacaggaggagggaggagctggtagggagatgctggctttacctaaggtctcgaaacaaggagggcagaataggcagaggcctctccgtcccaggcccatttttgacagatggcgggacggaaatgcaatagaccagcctgcaagaaagacatgtgttttgatgacaggcagtgtggccgggtggaacaagcacaggccttggaatccaatggactgaatcagaaccctaggcctgccatctgtcagccgggtgacctgggtcaattttagsctctaaaagcctcagtctccttatctgcaaatgagggcttgtgatacctgtttggaacgttgctgagcaaaatcaacgatacaggttcccacatatctacgggctaccacccggaagggcctattcgtaggtaaagggcaggctgtaactggctgggggttgaacatacccccgggtggactctttaagggccagggccatttgta

SEQ ID NO: 128 - DNA, 855 bp, Homo sapiens
ccacgcgtccgaaattattgagcagcatcagttcggaatgtggatggaactgttatcacacggtctttttttattgttgaaacacatccaactcttacttgtgggatggacaaagggttggtggctctatacggagccaggtgcctgctggccagcaggctgtgtgagtcatccggtcttagaggcgctggatttctctgcagtgcaggccagccctgctgctccttggtgtagggggcagagccgggcagtgccccctccagcctcccagcaatcttcgtcccgttttcgtgagattccagcagtctccagtttgaggaaagaggcccactgtgtcttgaggctgaacttcttaacccactttatttttatgtgtccttatcagaacataagcagtgtctcaaactcaggccgtttactagtcgccaccgggcaaagctaaatacaacttttataagaacctggccaacggtagttgaagtcgacccaaacattttaaactttgccaattgtactagagccggagcaggcaaatggtggtagatcttcttagcaacaaacagttagaagacggaaagggctagggttagggtcttttggtcacccagcccttacctggttttcagataagaacttggcctgttaacattttcacgtagaagtgatcttcttggtacagccgaggtcttaagcytttactgaaacactatccytagctgccttatgatttaagtgaggattatagaacttcagccctaactttttcattatgtgtatttttcttcattcatgtcaggttggatttggcctagggagtcccagaaagaagtagaaaaagagagagaagcctaccgt

SEQ ID NO: 129 - DNA, 501 bp, Homo sapiens
ccacgcgtccgagcaggagcaatatgattattaagtattttgtgggtggcatcaagaccttgtttttatctgcacttagacaacattataaagtgcccttgtttttgtttgcacttatcacggtctcagattaaccttctgaagttgatattctgtgagattgtttatgtccaacaggaaaacaaaatgtcctggccatgagcatcagactagcgtgtaataacattaaggcctgtgacccaaatattgacagaattgaagttagaaatagttctacagtaatagagtcttcaatactccatttaaaataatgcatagaagctggacatggtggctcatgcctttaatctcagctacctgggaggctgcggcaggtggattgcttgaggtcaggcgttcgagaccagcctgggccttttggcctgtctcggcttttaacataccttcctcactcagcttaatcatttctcactttagatttataataagagatgtgtgact

SEQ ID NO: 130 - DNA, 1180 bp, Homo sapiens
ccacgcgtccggaagaaaagagtgaaaattcctcggaggacggtgacataacggataagagtctttgtggaagtggtgaaaagtacatcccacctcatgtgaggcaagctgaggagacagtggacttcaagaaaaaggaagaactagaaaggctgaagaaacatgtaaaaggtctacttaacaggttgagtgaacccaacatggcttccatcagtgggcagctggaggaactgtacatggcccacagcagaaaggacatgaatgacaccctgacctccgctctcatgggtgcctgcgtcactgcctcggccatgcccagcagactgatgatggagcatgttctcttagtcagcatccttcaccacacagttggaatcgaggtcggtgcccactttctggaggcagtggtgaggaagttcgatgccatctataaatacggaagcgaagggaaagagtgtgacaacctgttcaccgtcattgcccatttatacaacttccacgtggtacagtctctcctcatcttcgacattttgaaaaaactgattggaactttcaccgaaaaagatattgaactgatcttgttaatgctgaaaaacgtgggtttttcattgaggaaagatgatgctttatcacttaaggaattgatcactgaagcccagaccaaagccagcggggcaggcagcgagtttcaggaccagaccaggattcggtttatgctagagacgatgttggccctgaagaacaatgacatgcgcaaaattccaggctatgaccccgagcccgtggagaagctgaggaaactgcagagagctttggtccgcaacgccggctcaggttctgagacgcagcttcgcgtctcctgggacagtgtcttgagtgcggagcagacgggtcgctggtggattgtggggtccgcctggagtggggccccgatgatcgacaacagtcaccatacgcacctgcagaagcagcttgtggggacggtagggacacccatgctcaaggctgccaggcagaggcacccccmtgtgtggtgtgtggtcctggctttacctggagcagctctcttactgttcttgaatggtcactgaaatgtacaaggtttatctggaggccttacagaaattgctattaatattacattgtgatataattattccaaaaaaaaaaaaaaaaaaaa

SEQ ID NO: 131 - DNA, 397 bp, Homo sapiens
  misc_feature (379)..(379): n equals a,t,g, or c
cgggtcgacccacgcgccatgaagatcccggtccttcctgccgtggtgctcctctccctcctggtgctccactctgcccagggagccaccctgggtggtcctgaggaagaaagcaccattgagaattatgcgtcacgacccgaggcgtttaaggctgatgagttcctgaactggcacgccctctttgagtctatcaaaaggaaacttcctttcctcaactgggatgcctttcctaagctgaaaggactgaggagcgcaactcctgatgcccagtgaccatgacctccactggaagagggggctagcrtgagcgctgattctcaacctaccataactctttcctgcctcaggaactccaataaaacattttccatccaanaaaaaaaaaaaagcggcc

SEQ ID NO: 132 - DNA, 1013 bp, Homo sapiens
gctctcctcgtctgtgcacggacgagtggccgactctggagcccaggctgttgcttcccagactggtggtgaatcctccatagtctgggacaaatatggccctgaaggctccatgagcagacgagaaggctggacttcgcaactgggtcaccttagatccggaactagagaatgacaccgttgtttccgggaggaaaaagaaaaagcgcttgacccggaagctgcgtgtcccatccccgcgcctgcttctctgactggggtgaggccgcagcggactgccctttcccaagatggcgtcgaagataggaagcccgacatcccagtgccttacctgtatttcgacatgggggcagccgtgctgtgcgctagtttcatgtcctttggcgtgaagcggcgctggttcgcgctgggggccgcactccaattggccattagcacctacgccgcctacatcgggggctacgtccactacggggactggctgaaggtccgtatgtactcgcgcacagttgccatcatcggcggctttcttgtgttggccagcggtgctggggagctgtaccgccggaaacctcgcagccgctccctgcagtccaccggccaggtgttcctgggtatctacctcatctgtgtggcctactcactgcagcacagcaaggaggaccggctggcgtatctgaaccatctcccaggaggggagctgatgatccagctgttcttcgtgctgtatggcatcctggccctggcctttctgtcaggctactacgtgaccctcgctgcccagatcctggctgtactgctgccccctgtcatgctgctcattgatggcaatgttgcttactggcacaacacgcggcgtgttgagttctggaaccagatgaagctccttggagagagtgtgggcatcttcggaactgctgtcatcctggccactgatggctgagttttatggcaagaggctgagatgggcacagggagccactgagggtcaccctgccttcctccttgctggc

SEQ ID NO: 133 - DNA, 5747 bp, Homo sapiens
  misc_feature (3835)..(3835): n equals a,t,g, or c
  misc_feature (5747)..(5747): n equals a,t,g, or c
aaaaaagaagaaagaaagaaaagagaaacataagctagactgaaacataggggcaacactttcactgtgcttttcaatccaaaataattttcctaagagcccactatgtaccacacactattgagcacttgggattaaaaaaaagttctccagaggctttccagtctagtgccatgtgtctcagtcttggtgctactggtattcggggcttcagaattatttgttggggattggtggggtggggagctttcctgtgcttcgtaggaggttcagcaacacctctggcttctaccaaatagataccagtaagcacatgcaccctcacagccagatgggacaatcagcaatgtcttcagccattgccaggggacagaatcatcctcgattgaaagcatctggtctaaggggaaagaccagtgtggaagtcagacaggaagtcactggcaggctagtatcctttggatgaacagtttacttactataagttgtcctggtcaaggcagctgggcagaaggcactggtggggagggtgaaggggttcttagtaattctgcttctttagtctgtacctgaaacacagtcattgattttacccactgagtggcctttaggggaagtgtatcatttccctctccttcctctctccctctggcatatggctcagcatttcctcacccgtttcacatgagcagatttgacacgttgctctgtccccagacttgcataacagcaaaaagctttatgcagtctggatggattcacaaaattaagccagtgggcagcagagtaataatccgtcagcttaggtgatataaaaggtcttgattagcccaggataatatatagtacatgctgaaggccctcttattccacggtatttatttgccattgcaagtatcttcctactacttcattctagaatagacaagcaatgtttaatgtatgagtctgcatttcacaagatcagtgtaataaacttaaccacattttgtctttttacagatgaacacagtatagagcatgaatttttttcatcttctctggcgacagttttccttctcatctgtgattccctcctgctactctgttccttcacatcctgtgtttctagggaaatgaaagaaaggccagcaaattcgctgcaacctgttgatagcaagtgaatttttctctaactcagaaacatcagttactctgaagggcatcatgcatcttactgaaggtaaaattgaaaggcattctctgaagagtgggtttcacaagtgaaaaacatccagatacacccaaagtatcaggacgagaatgagggtcctttgggaaaggagaagttaagcaacatctagcaaatgttatgcataaagtcagtgcccaactgttataggttgttggataaatcagtggttatttagggaactgcttgacgtaggaacggtaaatttctgtgggagaattcttacatgttttctttgctttaagtgtaactggcagttttccattggtttacctgtgaaatagttcaaagccaagtttatatacaattatatcagtcctctttcaaaggtagccatcatggatctggtagggggaaaatgtgtattttattacatctttcacattggctatttaaagacaaagacaaattctgtttcttgagaagagaatattagctttactgtttgttatggcttaatgacactagctaatatcaatagaaggatgtacatttccaaattcacaagttgtgtttgatatccaaagctgaatacattctgctttcatcttggtcacatacaattatttttacagttctcccaagggagttaggctattcacaaccactcattcaaaagttgaaattaaccatagatgtagataaactcagaaatttaattcatgtttcttaaatgggctactttgtcctttttgttattagggtggtatttagtctattagccacaaaattgggaaaggagtagaaaaagcagtaactgacaacttgaataatacaccagagataatatgagaatcagatcatttcaaaactcatttcctatgtaactgcattgagaactgcatatgtttcgctgatatatgtgtttttcacatttgcgaatggttccattctctctcctgtactttttccagacacttttttgagtggatgatgtttcgtgaagtatactgtatttttacctttttccttccttatcactgacacaaaaagtagattaagagatgggtttgacaaggttcttcccttttacatactgctgtctatgtggctgtatcttgtttttccactactgctaccacaactatattatcatgcaaatgctgtattcttctttggtggagataaagatttcttgagttttgttttaaaattaaagctaaagtatctgtattgcattaaatataatatgcacacagtgctttccgtggcactgcatacaatctgaggcctcctctctcagtttttatatagatggcgagaacctaagtttcagttgattttacaattgaaatgactaaaaaacaaagaagacaacattaaaacaatattgtttctaattgctgaggtttagctgtcagttctttttgccctttgggaattcggcatggtttcattttactgcactagccaagagactttacttttaagaagtattaaaattctaaaattctattaatctctcattaayagtatttaatataaagattcttaaaattactgacgttatgaattggtttgatgcttttctcatgtacctcaatccttattttaaaataagatcaataacactattttcctaaatgttgtccttacctgccctacacatattcagaattgctatggcagattaagacatgtcaatggaagaggtcagaggagtaatattattggaaacagctgtaataggtgccataaaaagcaaacaaacaaaagtattttggttctttgcgaccacagctgtccccaaatatacagatgattcagcacttattttaaaatgaatctgggtattgctaatacccccaaattagcagtttttaattttaaaatacatgagaaatgggactttgtcttgkctccaaagcagtcatctaaaatctacacccccacgattagatgagktattactgagaagktattgsacccacmaaaaagctgccawttttttccaaagatggcaaaagctagaaggccaggtcttctcaaagtaaaatacactgkgtattggggaaaaaagggtaagaggcataattaccaagktaggcatagtctgkcaagktgkatttagctattatcatggaatagtgktattccctgataatgaatgktggcatcataaccagaatgattattctcatctccatatcttcgkatttacatctaggaaatataaagcttawttatrgkgaacactgaragtggtctctytccaaggagtaaagtaaatatgccctggctaactagtgtaagtttgtattctacataattaaccattataagaagtcactgagtagatcctaacttaagggatatttgtttgtgtttgagtatttctcgtgtggtgtttctaagtttgaaaagtgttttataagcatagagcttatgtgtgctamtggggacaaatgtctcattttaaaggaaagagggttttctragatggcatgaaatgagtgaaatctatttattgcctgaaagctaaagtggaatatgaaggcaagtctttctgamcagagcagtcctgtcactgactaacccagggaaaggmcagggaaaagctagaaagtgttttgaaaactcttctgcttaccttttgaattgggncattamcaaagtaaggaccatttatgtgactggcttcctttggttagttatgattcattcattaattaattcatcagatttatatagagcacctgccatgagccaggcattatactaggtgtttgggaaacattggtaaacaaaagcaaagatccctgcttttatggaacttaagatattctgagacactggatcatacattctagtgcagtcaccttattaaaacttaagattttgtgatgcaaacaaacagccagaagctacaaataatgtaaatgttatatttaaaaaatacaatttcmaagaaatgacatttaaaccagttttaggaaagctgaagacaatactgcttttagagctttttaagatcagtttatattgctcttaaatgataatcctcagcttccaagtttttgtgaactcactttggtttatgtgtttgctacactcactgagaaattaaacaccttgcttgatttattgtaaaaaggaaaaaacaacagagccatacttaagcagtcttaaacttatttattaacgttatcttgagtctacagagaacagaaagctatctaagaggtagaaagctgtcaaatacctattatcaaactctgaattctcctataatatttcataaagctattataacaccttaataccttactgtcagtgtctgtttgcagcctttccacatttcttctacataattgaaacagtcttgatattcttttgccattgggactgcttgtcagacacacttcattgcagccttttattggctatttggaaaggaagcaaggggtacagtgggggcgcacacaggcctggagtctggttcattctccagaatagaaataaaaccccccagtctctgcctttaatgccttccatccagttgttttgctgtatctcatgccwmctttttaaaaaactgccttaattttctaatctttctcatccccaaacacatataatctagtgaatcacatcatttccttgcataactataaaagattatcctttcccaaaaagcctttttataagtgccacctaacacattcatgggctgcttccctgggccatctggtatatgatttatgaatttactcattttactatgaggattattagcaagtaaaattaggaaggttatcccaactcctaaaaaagttatacaaaaataaaatgatcttgtatcaagaataaaaataactattcactatttaggattattcacacacacacacaccytctatacaccactaaagcctcccattaaacccatagaagacttaaagagctaaaagaggctataatataaaaaaaaaaaaaraaaaggactaaattgggttgacttcacaatggtttgctgtcctgccccttggccatgacttccatccagcatctactcttagaatcagagtgtatactctgaaacagaagcagctctccccaagctggctgtcttctgccaagtctggaggttgcagctctgaaagagggtggtaccaggggccaacgcctggtgcagcctcaggagcaacaggaccataggctcctgaggaaattgtccaagagagccagagcaccagtgttctctgcagtatgacttgggcatttgtttagtctggatttcctgtgtaatcagtgttttcctctgggactgtaatagaaccagtctactctccaagaggcctttagccaaagctcataatgawargactagctattaattgtctactactttctgkctactatactaaacattttacgtatgccatctaatttaacargcctatctgctaggtactattaatccccttttgatagatgaagactttgagatttagagaggttaagccacttgccctggtcacgcagtgacaggtctgtctgggcttcctctcttccn

SEQ ID NO: 134 - DNA, 1262 bp, Homo sapiens
ccacgcgtccgggctcccgccccagagaagtccaggaaacatttagccctctactcactggccatcttcgtggtgatcactgtgcactttggggcccaggacatcttaaccctttatgaactaagcacacccctctgctgggactccaaactaatcggctatggttctgcagctcagcatctcccctacctcaccagcctgctggccctgaagctcctgcagtactgcctggccgatgcctgggtagctgagatcggcctggccttcaacatcctggggatggtggtctttgcctttgccactatcacgcctctcatgttcacaggatatgggttgcttttcctgtcattagtcatcacacctgtcatccgggctaaactctccaagctggtgagagagacagagcagggtgctctcttttctgctgtggcctgtgtgaatagcctggccatgctgacggcctccggcatcttcaactcactctacccagccactctgaactttatgaaggggttccccttcctcctgggagctggcctcctgctcatcccggctgttctgattgggatgctggaaaaggctgatcctcacctcgagttccagcagtttccccagagcccctgatctgcctggaccagaagacagagggcaagaggagcaaagtgaacaccaagcaactggaggtctgcagctggaagcccagcccacagcaggacaagcaactcttgtctaagggcagtgctctctttggacgaggtagtcaagagagaccwaggcaccaccccatccacagctgacccagcctctgtctaggatctagaatcataacccacacaggcccactgcaggcacaggtggcagaggagctatttgggacaggagtcagttctccctttctgctatccatcacttataaccccacaggccagaggagaggtcctgagagaggtgacacttcagggaccagaggcagcacgagggctggcatctctccttccagcccaaactgcacagccccaaccaggttcccaacacgtgtagcagtcatcagccattccttaacaatgaatgtggtacctggttagtgccagccttgggaaggagggagggaggtaagaggggcttggtgatctctggaggaagagtgttgcctttgctgtggttggggaatcgatccttggctatggcctacccactcccctggctgaagagtgccaatcattacaaatcagcttcagcaaactgaaaaaaaaaaaaaaaaa

SEQ ID NO: 135 - DNA, 3279 bp, Homo sapiens
gctgccgcgtctcgacgtgtcaccggcggcgccgctgctgtggcaaaggaaggagctgactgggggagttcgaggcggcgggcggcggtgaccccggcctggaactgccccggtacggaagtgttccggggtccgtggggagcaggagagggaggcggcggaccgtcccgcgcggggcacgatgttgaacatgtggaaggtgcgcgagctggtggacaaagccaccaatgttgttatgaattattcagagatcgagtctaaggttcgagaggcaacgaacgatgatccttggggaccttctgggcaactcatgggagagattgccaaggctacatttatgtatgaacaatttccagaacttatgaacatgctttggtcacgaatgttaaaagacaacaaaaagaattggagaagagtttataagtcgttgctgctcctagcttacctcataaggaatggatcagagcgtgttgttacaagtgccagagaacacatttatgatttacgatccctggaaaattaccactttgtagatgagcatggtaaggatcaaggtataaatattcgacagaaggtgaaggaattggttgaatttgcccaggatgacgacaggcttcgtgaagagcgaaagaaagcaaagaagaacaaagacaagtatgttggggtttcctcagacagtgttggaggattcagatacagtgaaagatatgatcctgagcccaaatcaaaatgggatgaggagtgggataaaaacaagagtgcttttccattcagtgataaattaggtgagctgagtgataaaattggaagcacaattgatgacaccatcagcaagttccggaggaaagatagagaagactctccagaaagatgcagcgacagcgatgaggaaaagaaagcgagaagaggcagatctcccaaaggtgaattcaaagatgaagaggagactgtgacgacaaagcatattcatatcacacaggccacagagaccaccacaaccagacacaagcgcacagcaaatccttccaaaaccattgatcttggagcagcagcacattacacaggggacaaagcaagtccagatcagaatgcttcaacccacacacctcagtcttcagttaagacttcagtgcctagcagcaagtcatctggtgaccttgttgatctgtttgatggcaccagccagtcaacaggaggatcagctgatttattcggaggatttgctgactttggctcagctgctgcatcaggcagtttcccttcccaagtaacagcaacaagtgggaatggagactttggtgactggagtgccttcaaccaagccccatcaggccctgttgcttccagtggcgagttctttggcagtgcctcacagccagcggtagaacttgttagtggctcacaatcagctctaggcccacctcctgctgcctcaaattcttcagacctgtttgatcttatgggctcgtcccaggcaaccatgacatcttcccagagtatgaatttctctatgatgagcactaacactgtgggacttggtttgcctatgtcaagatcacagaatacagatatggtccagaaatcagtcagcaaaaccttgccctctacttggtctgaccccagtgtaaacatcagcctagacaacttactacctggtatgcagccttccaaaccccagcagccatcactgaatacaatgattcagcaacagaatatgcagcagcctatgaatgtgatgactcaaagttttggagctgtgaacctcagttctccatcgaacatgcttcctgtccggccccaaactaatgctttgatagggggacccatgcctatgagcatgcccaatgtgatgactggcaccatgggaatggcccctcttggaaatactccgatgatgaaccagagcatgatgggcatgaacatgaacatagggatgtccgctgctgggatgggcttgacaggcacaatgggaatgggcatgcccaacatagccatgacttctggaactgtgcaacccaagcaagatgcctttgcaaatttcgccaattttagcaaataagagattgtaaaagaagcagattgaatgaagaatttttagctgtgcagataggtgatgttgggatggaaaatgctaatcaactaccctttcttttatcaagtaattaaaataaatctacataaagaaccaaaaaggctgttttataaaagtgaaatatccagtatttcagagggccaggcaagagcacttcagatgaggcagtcaaaatcatttttttccagtgaggatagaccacaagtgggtggtgagaccattgaaagcctttatcaactgaagagtccatttaacagcataatttgtgggaagactggaatagggctgaataaatgtgtttgaatctctaattttatactttcttttcctgaggaacttgatttttctgtccctggatcgccttgtcataattgggtctgttccttttactaccactcttgagtccatatatgaaatcattaaagttggatgatcagttttttataaaaatatatatttttgtccaagaaaaaaaaaagcatacatatgtgattatggctaaatcaaaggtaactggaatgtatatacttttgctaatgttccagcaacactgctattatactatccaaatttttattgtaacaaaacctctttaagcaattggtgattgccatgggacttttcccatgtcttctgctgtaattatcctgtgcagaactaggaagaaatttttttcaggactgctctatggtttcctttaaaagaaaaaaacttctgtttgtttttagcagtcattatttacaatttgcagtgattaacttggcaaggcttccttccgtgtttatccctgtagccatcatttaagtcaggaacagtcagaaaaatatttattttattttttttttgggtgtctgcaaaggtaaaaatccattaaaaccttaagttaaatataaatgttacaactcaatgtttgcttttagattttatacagtatttgttttgttttggttttgagtgtatataatgcagcattagcaatatggttccaatagaggagttaaatatatattgttaaaggagacctgtagcagtcaaagattttattgatttaatgacaaaggaaattaatgaaaatgtttttgtttttctgctgkaattctgcattaagctcacatgaaaatcaygattctagagtttgcaatgcaaaattaattggtttaccctcaagctgggaatatttttcaaaa

SEQ ID NO: 136 - DNA, 2394 bp, Homo sapiens
tgcggccgcgggagcttcccgggcctggccgtggaaccaggcagcaacctggacatggaagatgaggaggaggaagagctgaccatggagatgtttgggaacagctccatcaagtttgagctggacatcgagcccaaggtgttcaagccgccgagtagcacagaggccctgaatgacagccaggagttccccttccccgagacgcccaccaaagtgtggccgcaggacgagtacatcgtggagtactcactagagtatggcttccttcgcctgtcgcaggccacccgccagcgcctgagcatccccgtcatggtggtcaccctggaccccacgcgggaccagtgcttcggggaccgcttcagccgcctgctgctggatgagttcctgggctacgatgacatcctcatgtccagcgtgaagggcctggccgagaacgaggagaacaagggcttcctgcggaatgtggtgtcgggcgagcactaccgctttgtgagcatgtggatggcgcggacgtcctacctggccgccttcgccatcatggtcatcttcacgctgagcgtgtccatgctgctgcggtactcacaccaccagatcttcgtcttcatcgtggacctgctgcagatgctggagatgaacatggccatcgccttccccgcagcgcccctgctgaccgtcatcctggccctcgtcgggatggaggccatcatgtcggagttcttcaacgacaccaccaccgccttctacatcatcctcatcgtgtggctcgcggaccagtatgacgccatctgctgccacaccagcaccagcaagcggcattggctgcggtgagcgtggcgcgggggcagggtggagtgggtgctggtgggcaggggtagggggctgccagagggaggggcgctggaggcgggggtggtggctgcgccacgcgggaaccccaggggctgggcctggcagggtgggacctgcagccccgaygccctcaccccgccccgcaggttcttctatctctaccacttcgccttctatgcctatcactaccgcttcaatgggcagtatagcagcctggccctggtcacctcctggctcttcatccagcattccatgatctacttcttccaccactacgagctgcctgccatcctgcagcaggtccgcatccaggagatgctgcttcaggcgccgccactgggccccgggacccccacggcgctgcccgatgacatgaacaacaactcgggcgccccggctacagcccctgactctgccggccagccccccgccctgggccccgtctcgccyggggccagcgggagtcccgggcctgtggcagcggcgcccagctccctggtggccgcggcagcctcagtggcagcagctgccggtggtgacctgggttggatggcagagaccgctgccatcatcacagacgcctccttcctgtccggcctgagcgcctccctcctggagcggcgtccagccagcccgctgggccctgctgggggcctcccccacgccccccaggacagtgtccccccgagtgactccgcagcttctgacacaactcccctgggggctgcggtaggcgggcctagcccggcctccatggccccaacggaggcgccctcggaggtggggtcctgagccgcacagctgagccgcctctgacccctgctggctgggcctgaccttcccgagcccgtgggggtgggggaggccagccacctccttcctctgggactgcccagcctgtgtcgggggctttcagggtttcgtggggtttgcccggaaggcggctttcctccccctggtgtgaggtcgcgcccgaggcttgtacccgctagtgaggtgtttgagctggtcagcaaggagagggggtggggttccgcggaaggttctggaggggtcttggtaggtctgcagtgaaccgtcctgaggatggagtggggtcccatggtgcaggtctctgagcaaggcggaggtgtggaggagaggccggcttggggtggggcctcgcgccctagtgccggccggcctcagcccggctctgcctggtgctccctgcagtgccttctccatggccccgccctccccgcgtgtgcgccaggcytggggtccccgggagagcagagcttgcgcctcgggcatagggacgtggggtgcaggcgccaacatcagtggcagcagccagggccgtggtccagtcccactcggggatggagtgggccggcggccaaaccagtcactcggggaggaatgcggaggagcgctcattccattctatttaattgcagtgtacaaaattgtgtttgtatatagaataaactgtctgttgacagcgaaaaaaaaaaaaaaaaaaaaaaaaaaaaaagggcggccgctcgccggacgcgtggg

SEQ ID NO: 137 - DNA, 614 bp, Homo sapiens
ccacgcgtccgaacccctgctgtggtgataaaatgtttgttttttccattacccctatagtgtgtaatgctgtgtcatggagctaaaatcggatttttccaaggagatatcaggctgctcatggatgacctcaaggtgcttcaacccactgtcttccccgtggttccaagactgctgaaccggatgtttgaccgaattttcggacaagcaaacaccacgctgaagcgatggctcttggacttcgcctccaagaggaaagaagcagagcttcgcagcggcatcatcagaaacaacagcctgtgggaccggctgatcttccacaaagtacagtcgagcctgggcggaagagtccggctgatggtgacaggagccgccccggtgtctgccactgtgctgacgttcctcagagcagccctgggctgtcagttttatgaaggatacggacagacagagtgcactgccgggtgctgcctaaccatgcctggagactggaccgcaggccatgttggggccccgatgccgtgcaatttgataaaacttgttgatgtggaagaaatgaattacatggctgccgagggcgagggcgaggtgtgtgtgaaagggccaaatgtatt

SEQ ID NO: 138 - DNA, 1861 bp, Homo sapiens
gggaggactcaccatccaaggagcatgacaagagcggcgaggaggagcagggagccgaggaggggccaggggtgcctgcggccaccaccgaagaccacattcaggtggaagcgagggtcggacccacggacgggaccccagaaccccaagtggagctcaggccccgtgatacgaggcgcatcagtctacgttttagaagaaggaagaaggagggcccagcacggaaaggagcggcagccatcgaagctgaggacagggaggaagaagagggggaggaagagaaagaggcccccacggggagagagaagaggccaagccgctctggaggaagagtaagggcggccgggcggcggctgcagggcttctgcctgtccctggcccagggcacatatcggccgctacggcgcttcttccacgacatcctgcacaccaagtaccgcgcagccaccgacgtctatgccctcatgttcctggctgatgttgtcgacttcatcatcatcatttttggcttctgggcctttgggaagcactcggcggccacagacatcacgtcctccctatcagacgaccaggtacccgaggctttcctggtcatgctgctgatccagttcagtaccatggtggttgaccgcgccctctacctgcgcaagaccgtgctgggcaagctggccttccaggtggcgctggtgctggccatccacctatggatgttcttcatcctgcccgccgtcactgagaggatgttcaaccagaatgtggtggcccagctctggtacttcgtgaagtgcatctacttcgccctgtccgcctaccagatccgctgcggctaccccacccgcatcctcggcaacttcctcaccaagaagtacaatcatctcaacctcttcctcttccaggggttccggctggtgccgttcctggtggagctgcgggcagtgatggactgggtgtggacggacaccacgctgtccctgtccagctggatgtgtgtggaggacatctatgccaacatcttcatcatcaaatgcagccgagagacagagaagaaatacccgcagcccaaagggcagaagaagaagaagatcgtcaagtacggcatgggtggcctcatcatcctcttcctcatcgccatcatctggttcccgctgctcttcatgtcgctggtgcgctccgtggttggggttgtcaaccagcccatcgatgtcaccgtcaccctsaagctgggcggctatgagccgctgttcaccatgagcgcccagcagccgtccatcatccccttcacggcccaggcctatgaggagctgtcccggcagtttgacccccagccgctggccatgcagttcatcagccagtacagccctgaggacrtcgtcacggcgcagattgagggcagctccggggcgctgtggcgcatcagtccccccagccgtgcccagatgaagcgggagctctacaacggcacggccgacatcaccctgcgcttcacctggaacttccagagggacctggcgaagggaggcactgtggagtatgccaacgagaagcacatgctggccctggcccccaacagcactgcacggcggcagctggccagcctgctcgagggcacctcggaccagtctgtggtcatccccaatctcttccccaagtacatccgtgcccccaacgggcccgaagccaaccctgtgaagcagctgcagcccaatgaggaggccgactacctcggcgtgcgtatccagctgcggagggagcagggtgcgggggcccacggcttcctcgaatggtgggtcatcgagctgcaggagtgccggaccgacttgcaactgctgcccatggtcattttcagtgacaaggtcagcca

SEQ ID NO: 139 - DNA, 903 bp, Homo sapiens; identical to SEQ ID NO: 82
  misc_feature (897)..(897): n equals a,t,g, or c

SEQ ID NO: 140 - DNA, 1198 bp, Homo sapiens
ttaattgaaaaattctgtgtatcagcgaacatgatacagcccacagcctgcgggtctgcgcccctggattaacatgctgccctgccaggaggacacgacctgcagccccatcctaactctggccaccccatcctgcaggcatgccggctgccgctccaggactcccctgtccccaggaccaagatgacgcccaacagcactggcgaggtgcccagccccattcccaagggggctttggggctctccctggccctggcaagcctcatcatcaccgcgaacctgctcctagccctgggcatcgcctgggaccgccgcctgcgcagcccacctgctggctgcttcttcctgagcctactgctggctgggctgctcacgggtctggcattgcccacattgccagggctgtggaaccagagtcgccggggttactggtcctgcctcctcgtctacttggctccsaacttctccttcctctccctgcttgccaacctcttgctggtgcacggggagcgctacatggcagtcctgaggccactccagccccctgggagcattcggctggccctgctcctcacctgggctggtcccctgctctttgccagtctgcccgctctggggtggaaccactggacccctggtgccaactgcagctcccaggctatcttcccagccccctacctgtacctcgaagtctatgggctcctgctgcccgccgtgggtgctgctgccttcctctctgtccgcgtgctggccactgcccaccgccagctgcaggacatctgccggctggagcgggcagtgtgccgcgatgagccctccgccctggcccgggcccttacctggaggcaggcaagggcacaggctggagccatgctgctcttcgggctgtgctgggggccctacgtggccacactgctcctctcagtcctggcctatgagcagcgcccgccactggggcctgggacactgttgtccctcctctccctaggaagtgccagtgcagcggcagtgcccgtagccatggggctgggcgatcagcgctacacagccccctggagggcagccgcccaaaggtgcctgcaggggctgtggggaagagcctcccgggacagtcccggccccagcattgcctaccacccaagcagccaaagcagtgtcgacctggacttgaactaaaggaagggcctctgctgactcc

SEQ ID NO: 141 - DNA, 1926 bp, Homo sapiens
cgcttctyttcctctgtctcccccccatatccgtgcgccgagctgataaaggcgccattttggaggggccgcgggagacgtggtgccgctgcgggctcgctctgccgtgcgctaggcttggtgggaaggcctgttctcgagtccgcgcttttcgtcaccgccatgtcgggaggtggtgtgattcgtggccccgcagggaacaacgattgccgcatctacgtgggtaacttacctccagacatccgaaccaaggacattgaggacgtgttctacaaatacggcgctatccgcgacatcgacctcaagaatcgccgcgggggaccgcccttcgccttcgttgagttcgaggacccgcggwgasgcggcatggggcttgcagccttgaggaaataggtccgagtagttggggaaggctccaaggccttaacatagagaacggggaagcgggggctcttagagaggttggggcgagactgtatcgcccatgcaggagtcgagtaaggagctgagttgatgtggcttctctggcgcctcgccttggacgtccccggagcccattcgcaggctggagcgggaaactgaggcgctgagggctggtgtagtggttgggagcctggcgtgtttctgggtgggggaggggccattcctattatgcggcgcatgtgggctcttccacgttgggtgcgcatgtgcggggggtttgctggttcccaactgagcgagcttttcctcctggtgtttctcatcccttttactttctgcgatcccgcagagacgcggaagacgcggtgtatggtcgcgacggctatgattacgatgggtaccgtctgcgggtggagtttcctcgaagcggccgtggaacaggccgaggcggcggcgggggtggaggtggcggagctccccgaggtcgctatggccccccatccaggcggtctgaaaacagagtggttgtctctggactgcctccaagtggaagttggcaggatttaaaggatcacatgcgtgaagcaggtgatgtatgttatgctgatgtttaccgagatggcactggtgtcgtggagtttgtacggaaagaagatatgacctatgcagttcgaaaactggataacactaagtttagatctcatgagacatatctgaagagatggattaagaatgctttggattaaggattgtggagcacatttcaatcattttaggattgtcaaaaggaggattgaggaggatcagatcaataatggaggcaatggtttggattggagagggctcactggatcccaatccttggagctggatcattggattcaaatcataatgtggataggatagggaggatgaattaccaggattcatggagcgggatcagattaccaggaacataggagtggattcctgccccaaccaaaccgcattcgtgtggatttttttattcaacttaattggctattccaaagattttttttttcctatttttgacgattggagcccttaagatgcacgatggaattgtgttttgcgttttttggtaaaaggagcaaagcgaggacctggagataaacgctggagcaatctccttggaaggattcagcacgagtagatggtaaacatttaaaggggaaagggggggtttgtttaaaatagtaaatcagtaagtcacttctaaatttaaagaaaacaaaattggagttgaagaataagtaggtttccaattggctattgccgttttctttgaaaaaataaacattttttaaaaaactatgcatggttgtcctttttcctcttcatgtaagattctaactgggtctatcagttaatctttaaattgttaagtaagataagattttgactcttgtgttaatgtgttagcaaattaaaagttcttaaaaggcaaaaaaaaaaaaaaaaaaaaaaaaaaaaaaaaaaaaa

SEQ ID NO: 142 - DNA, 738 bp, Homo sapiens
  misc_feature (701)..(701): n equals a,t,g, or c
  misc_feature (704)..(704): n equals a,t,g, or c
acggctgcgagaagacgacagaaggggagtgttagactgaagataaagtaagtgctgtttgggctaacaggatctcctcttgcagtctgcagcccaggacgctgattccagcagcgccttaccgcgcagcccgaagattcactatggtgaaaatcgccttcaatacccctaccgccgtgcaaaaggaggaggcgcggcaagacgtggaggccctcctgagccgcacggtcagaactcagatactgaccggcaaggagctccgagttgccacccaggaaaaagagggctcctctgggagatgtatgcttactctcttaggcctttcattcatcttggcaggacttattgttggtggagcctgcatttacaagtacttcatgcccaagagcaccatttaccgtggagagatgtgcttttttgattctgaggatcctgcaaattcccttcgtggaggagagcctaacttcctgcctgtgactgaggaggctgacattcgtgaggatgacaacattgcaatcattgatgtgcctgtccccagtttctctgatagtgaccctgcagcaattattcatgactttgaaaagggaatgactgcttacctggacttgttgctggggaactgctatctgatgcccctcaatacttctattgktatgcctccaaaaaatctggtagaagasctmkttgctgtggagggaatncgngatggtagtaaaccttgcattcttatttaccact

SEQ ID NO: 143 - DNA, 670 bp, Homo sapiens
acccacgcgtccgggagaacatgcagctcggcactgggctcctgctggccgccgtcctgagcctgcagctggctgcagccgaagccatatggtgtcaccagtgcacgggcttcggagggtgctcccatggatccagatgcctgagggactccacccactgtgtcaccactgccacccgggtcctcagcaacaccgaggatttgcctctggtcaccaagatgtgccacataggctgccccgatatccccagcctgggcctgggcccctacgtatccatcgcttgctgccagaccagcctctgcaaccatgactgacggctgccctcctccaggcccccggacgctcagcccccacagcccccacagcctggcgccagggctcacggccgcccctccctcgagactggccagcccacctctcccggcctctgcagccaccgtccagcaccgcttgtcctagggaagtcctgcgtggagtcttgcctcaatctgctgccgtccaagcctggggcccatcgtgcctgccgccccttcaggtcccgacctccccacaataaaatgtgattggatcgtgtggtacaaaaaaaaaaaaaaaaaaaaaaaaaaaaaaaaaaaaaaaaaaaaaaaaaaaaaaaaaaaaaaaaaaaaaaaaaaaaaaaaaaaaaaagggg

SEQ ID NO: 144 - DNA, 631 bp, Homo sapiens
ccacgcgtccggttttctgggcagaggagggagcacaaccaactccctggggaaggcaacagatgtcccagatgtgatgaacttatgttaggacacaccataaaggaagccccttatgaccttcatccatatttgaaagttgagagcagcatgttttgcccactgaaactcatcctgctgccagtgttactggattattccttgggcctgaatgacttgaatgtttccccgcctgagctaacagtccatgtgggtgattcagctctgatgggatgtgttttccagagcacagaagacaaatgtatattcaagatagactggactctgtcaccaggagagcacgccaaggacgaatatgtgctatactattactccaatctcagtgtgcctattgggcgcttccagaaccgcgtacacttgatgggggacawcttatgcaatgatggctctctcctgctccaagatgtgcaagaggctgaccagggaacctatatctgtgaaatccgcctcaaaggggagagccaggtgttcaagaaggcggtggtactgcatgtgcttccagaggagcccaaaggaggagattgtatttcgttactaccacaaactcaggatgtctgcggagtactcccag

SEQ ID NO: 145 - DNA, 2049 bp, Homo sapiens
actgggtccctgcaggtcttggggcccgggactcttcctggagacaccgccatggccgggctatcccgcgggtccgcgcgcgcactgctcgccgccctgctggcgtcgacgctgttggcgctgctcgtgtcgcccgcgcggggtcgcggcggccgggaccacggggactgggacgaggcctcccggctgccgccgctaccaccccgcgaggacgcggcgcgcgtggcccgcttcgtgacgcacgtctccgactggggcgctctggccaccatctccacgctggaggcggtgcgcggccggcccttcgccgacgtcctctcgctcagcgacgggcccccgggcgcgggcagcggcgtgccctatttctacctgagcccgctgcagctctccgtgagcaacctgcaggagaatccatatgctacactgaccatgactttggcacagaccaacttctgcaagaaacatggatttgatccacaaagtcccctttgtgttcacataatgctgtcaggaactgtgaccaaggtgaatgaaacagaaatggatattgcaaagcattcgttattcattcgacaccctgagatgaaaacctggccttccagccataattggttctttgctaagttgaatataaccaatatctgggtcctggactactttggtggaccaaaaatcgtgacaccagaagaatattataatgtcacagttcagtgaagcagactgtggtgaatttagcaacacttatgaagtttcttaaagtggctcatacacacttaaaaggcttaatgtttctctggaaagcgtcccagaatattagccagttttctgtcacatgctggtttgtttgcttgcttgtttacttgcttgtttaccaatagagttgacctgttattggatttcctggaagatgtggtagctacttttttcctattttgaagccattttcgtagagaaatatccttcactataatcaaataagttttgtcccatcaattccaaagatgtttccagtggtgctcttgaagaggaatgagtaccagttttaaattgcccattggcatttgaaggtagttgagtatgtgttctttattcctagaagccactgtgcttggtagagtgcatcactcaccacagctgcctcctgagctgcctgagcctggtgcaaaaggattggcccccattatggtgcttctgaataaatcttgccaagatagacaaacaatgatgaaactcagatggagcttcctactcatgttgatttatgtctcacaatcctgggtattgttaattcaacatagggtgaaactatttctgataaagaacttttgaaaaactttttatactctaaagtgatactcagaacaaaagaaagtcataaaactcctgaatttaatttccccacctaagtcgagacagtattatcaaaacacatgtgcacacagattattttttggctccaaaactggattgcaaaagaaagaggagaagaatattttgtgtgttcctggtattcttttataagtaaagtttacccaggcatggaccagcttcagccagggacaaaatcccctcccaaaccactctccacagctttttaaaaatacttctactcttaacaattacctaaggcttcctcaactgccccaaatctcttaatagcttctagtgctgctacaatctaagtcaggtcaccagagggaagagaacatggcattaaaagaatcacatcttcagaagagaagacactaatattattacccatatacatgatttcagaagatgacataagattcctcttaaagaggaaatgtcaggaatcaagccactgaatccttaaagagaaaagttgaatatgagtcattgtgtctgaaaactgcaaagtgaacttaactgagatccagcaaacaggttctgtttaagaaaaataatttatactaaatttagtaaaatggacttcttattcaaagcatcaataattaaaagaattattttaatgaaaaaaaaaaaaaaaaaaaaaaaaaaaaaaaaaaaaaaaaaaaaaaaaaaagg

SEQ ID NO: 146 - DNA, 975 bp, Homo sapiens
  misc_feature (970)..(970): n equals a,t,g, or c
ccacgcgtccggcagggcctcgcccacaccaaacctgtggacgccgacccgggaccgccgctggctggctgctggctcactcgaccgtcatggagaccctgggggcccttctggtgctggagtttctgctcctctccccggtggaggcccagcaggccacggagcatcgcctgaagccgtggctggtgggcctggctgcggtagtcggcttcctgttcatcgtctatttggtcttgctggccaaccgcctctggtgttccaaggccagggctgaggacgaggaggagaccacgttcagaatggagtccaacctataccaggaccagagtgaagacaagagagagaagaaagaggccaaggagaaagaagagaagaggaagaaggagaaaaagacagcaaaggaaggagagagcaacttgggactggatctggaggaaaaagagcccggagaccatgagagagcaaagagcacagtcatgtgaagattcctggctgcctcttccaggcagtcccccagagatgcctcttctgccccctaaaagcagtgccctggacttgaagcccgtgaaatgactccatctgggattcagaatacagtgttctcaagtgaagaaggcttggaacccaccccacctccctcattgggggctctctgggcaaacatggttttcatgcacccctcttcctgagcttggtccctgcctggtgattcttcttatactcggagagcatccctggttgaggagacacccgcaatcctccacgatctcatggctccacctgcttctccccactgcctgatttcttttctctctgcctgatgtctactgaacagaacttcccytctcccaygcacccactgccagctgagagctgcttcccaatggcctgcattaaagcattcgtaacagccaaaaaaaaaaaaaaaaaaaaaaaacttcgggggggggcccgtacccaattggcctanaggtg

SEQ ID NO: 147 - DNA, 2335 bp, Homo sapiens
aaaaaaaaaaaaaagctagtgattccatatcttcaaatcaaatttcagtggagtgtttaccgggcaaggaaggcaggggggtcagcttgctgacagcctcaacctgccagccctcagcctgcacatttgtgatcacctggtcacacacctgggcaggaggctgcccctcctccctggtttgaggaagcaggaaaaggtacccgcgagagacagccagcagttctgtggagcagcggtggccggctaggatgggctgtctctggggtctggctctgccccttttcttcttctgctgggaggttggggtctctgggagctctgcaggccccagcacccgcagagcagacactgcgatgacaacggacgacacagaagtgcccgctatgactctagcaccgggccacgccgctctggaaactcaaacrctgagcgctgagacctcttctagggcctcaaccccagccggccccattccagaagcagagaccaggggagccaagagaatttcccctgcaagagagaccaggagtttcacaaaaacatctcccaacttcatggtgctgatcgccacctccgtggagacatcagccgccagtggcagccccgagggagctrgaatgaccacagttcagaccatcacaggcagtgatcccrrggaagccatctttgacaccctttgcaccgatgacagctctgaagaggcaaagacactcacaatggacatattgacattggctcacacctccacagaagctaagggcctgtcctcagagagcagtgcctcttccgacggcccccatccagtcatcaccccgtcacgggcctcagagagcagcgcctcttccgacggcccccatccagtcatcaccccgtcacgggcctcagagagcagygcctcttccgacggcccccatccagtcatcaccccgtcacgggcctcagagagcagcgcctcttccgacggcccccatccagtcatcaccccgtcacgggcctcagagagcagcgcctcttccgacggcccccatccagtcatcaccccctcatggtccccgggatctgacgtcactctcctcgctgaagccctggtgastgtcacaaacatcgaggttattaattgcagcatcacagaaatagaaacaacracttccagcatccctggggcctcagacayagatctcatccccacggaaggggtgaaggcctcgtccacctccgatccaccagctctgcctgactccactgaagcaaaaccacacatcactgaggtcacagcctctgccgagaccctgtccacagccggcaccacagagtcagctgcacctsatgccacggttgggaccccactccccactaacagcgccacagaaagagaagtgacagcacccggggccacgaccctcagtggagctctggtcacagttagcaggaatcccctggaagaaacctcagccctctctgttgagacaccaagttacgtcaaagtctcaggagcagctccggtctccatagaggctgggtcagcagtgggcaaaacaacttcctttgctgggagctctgcttcctcctacagcccctcggaagccgccctcaagaacttcaccccttcagagacaccgaccatggacatcgcaaccaaggggcccttccccaccagcagggaccctcttccttctgtccctccgactacaaccaacagcagccgagggacgaacagcaccttagccaagatcacaacctcagcgaagaccacgatgaagcccccaacagccacgcccacgactgcccggacgaggccgaccacagacgtgagtgcaggtgaaaatggaggtttcctcctcctgcggctgagtgtggcttccccggaagacctcactgaccccagagtggcagaaaggctgatgcagcagctccaccgggaactccacgcccacgcgcctcacttccaggtctccttactgcgtgtcaggagaggctaacggacatcagctgcagccaggcatgtcccgtatgccaaaagagggtgctgcccctagcctgggcccccaccgacagactgcagctgcgttactgtgctgagaggtacccagaaggttcccatgaagggcagcatgtccaagcccctgaccccagatgtggcaacaggaccctcgctcacatccaccggagtgtatgtrtggggaggggcttcacctgttcccagaggtgtccttggactcaccttggcacatgttctgtgtttcagtaaagagagacctgatcacccatctgtgtgcttccatcctgcattaaaattcactcagtgtgaaaaaaaaaaaaaaaaaaaaaaaaaaaa

SEQ ID NO: 148 - DNA, 614 bp, Homo sapiens
ccacgcgtccggtgacctcgcaggacactggtgaaggagcagtgaggaacctgcagagtmcacagttgctgaccaattgagctgtgagcctggagcagatccgtggkctgcagacccccgycccagtgcctctccccctgcagccctgcccctcgaactgtgacatggagagagtgwccctggcccttctcctactggcaggcctgactgccttggaagccaatgacccatttgccaataaagacgatcccttctactatgactggaaaaacctgcagctgagcggactgatctgcggagggctcctggccattgctgggatcgcggcagttctgagtggcaaatgcaaatgcaagagcagccagaagcagcacagtcctgtacctgagaaggccatcccactcatcactccaggctctgccactacttgctgagcacaggactggcctccagggatggcctgaagcctaacactggcccccagcacctcctcccctgggaggccttatcctcaaggaaggacttctctccaagggcaggctgttaggcccctttctgatcaggaggcttctttatgaattaaactcgccccaccaccccctcaaaaaaaaaaa

SEQ ID NO: 149 - DNA, 2082 bp, Homo sapiens
  misc_feature (2031)..(2031): n equals a,t,g, or c
  misc_feature (2036)..(2036): n equals a,t,g, or c
  misc_feature (2040)..(2040): n equals a,t,g, or c
  misc_feature (2076)..(2076): n equals a,t,g, or c
ccacgcgtccgaccgcgctccagacacagctctgcgtcctcgagcgggacagatccaagttgggagcagctctgcgtgcggggcctcagagaatgaggccggcgttcgccctgtgcctcctctggcaggcgctctggcccgggccgggcggcggcgaacaccccactgccgaccgtgctggctgctcggcctcgggggcctgctacagcctgcaccacgctaccatgaagcggcaggcggccgaggaggcctgcatcctgcgaggtggggcgctcagcaccgtgcgtgcgggcgccgagctgcgcgctgtgctcgcgctcctgcgggcaggcccagggcccggagggggctccaaagacctgctgttctgggtcgcactggagcgcaggcgttcccactgcaccctggagaacgagcctttgcggggtttctcctggctgtcctccgaccccggcggtctcgaaagcgacacgctgcagtgggtggaggagccccaacgctcctgcaccgcgcggagatgcgcggtactccaggccaccggtggggtcgagcccgcaggctggaaggagatgcgatgccacctgcgcgccaacggctacctgtgcaagtaccagtttgaggtcttgtgtcctgcgccgcgccccggggccgcctctaacttgagctatcgcgcgcccttccagctgcacagcgccgctctggacttcagtccacctgggaccgaggtgagtgcgctctgccggggacagctcccgatctcagttacttgcatcgcggacgaaatcggcgctcgctgggacaaactctcgggcgatgtgttgtgtccctgccccgggaggtacctccgtgctggcaaatgcgcagagctccctaactgcctagacgacttgggaggctttgcctgcgaatgtgctacgggcttcgagctggggaaggacggccgctcttgtgtgaccagtggggaaggacagccgacccttggggggaccggggtgcccaccaggcgcccgccggccactgcaaccagccccgtgccgcagagaacatggccaatcagggtcgacgagaagctgggagagacaccacttgtccctgaacaagacaattcagtaacatctattcctgagattcctcgatggggatcacagagcacgatgtctacccttcaaatgtcccttcaagccgagtcaaaggccactatcaccccatcagggagcgtgatttccaagtttaattctacgacttcctctgccactcctcaggctttcgactcctcctctgccgtggtcttcatatttgtgagcacagcagtagtagtgttggtgatcttgaccatgacagtactggggcttgtcaagctctgctttcacgaaagcccctcttcccagccaaggaaggagtctatgggcccgccgggcctggagagtgatcctgagcccgctgctttgggctccagttctgcacattgcacaaacaatggggtgaaagtcggggactgtgatctgcgggacagagcagagggtgccttgctggcggagtcccctcttggctctagtgatgcatagggaaacaggggacatgggcactcctgtgaacagtttttcacttttgatgaaacggggaaccaagaggaacttacttgtgtaactgacaatttctgcagaaatcccccttcctctaaattccctttactccactgaggagctaaatcagaactgcacactccttccctgatgatagaggaagtggaagtgcctttaggatggtgatactgggggaccgggtagtgctggggagagatattttcttatgtttattcggagaatttggagaagtgattgaacttttcaagacattggaaacaaatagaacacaatataatttacattaaaaaataatttctaccaaaatggaaaggaaatgttctatgttgttcaggctaggagtatattggttcgaaatcccagggaaaaaaataaaaataaaaaattaaaggattgttgataaaaaaaaaaaaaaagggcggccgcnctagngggnccaagctttacgtacgcgggcatgcgacgtcaagcncttcca

SEQ ID NO: 150 - DNA, 1362 bp, Homo sapiens
  misc_feature (482)..(482): n equals a,t,g, or c
  misc_feature (1306)..(1306): n equals a,t,g, or c
gcctggaacaggaggaggaaacgcaacctgggcggctcctaggacgcagagacgccgtccccgccttcattgagcccaacgtgcgcttctggatcaccgagcgccaatcctttattcgacgatttcttcaatggacagaattattagatcctacaaatgtgttcatttcagttgaaagtatagaaaactcgaggcaactattgtgcacaaatgaagatgtttccagccctgcctcggcggaccaaagggcaacagtgcatcccgacagcagcaacctgatccccaagctttttcgacctgcagcgttcctgcctttcatggcgcccacggtatttttgtcaatgacgccactgaaagggatcaagtccgtgattttacctcaggttttcctctgtgcctacatggcagcgttcaacagcatcaatggaaacagaagttacacttgtaagccactagaaagatcattactaatggcgggagcngttgcttcttcaactttcttaggagtaatccctcagtttgtccagatgaagtatggcctgactggcccttggattaaaagactcttacctgtgatcttcctcgtgcaagccagtggaatgaatgtctacatgtcccgaagtcttgaatccattaaggggattgcggtcatggacaaggaaggcaatgtcctgggtcattccagaattgctgggacaaaggctgttagagaaacgctagcatccagaatagtgctgtttgggacctcagctctgattcctgaagtcttcacctacttttttaaaaggacccagtatttcaggaaaaacccagggtcattgtggattttgaaactgtcttgtactgtcctggcaatgggactgatggtgccattttcttttagtatatttccacagattggacagatacagtactgtagtcttgaagagaaaattcagtctccaacagaagaaacagaaatcttttatcacagaggggtgtaggcgtgagttttaggtgaatttatgtggttcctgcttgaaaaccttcccctctccaggttcggtttagagaactttgccacaggtcttctggggaccccagaggtgtctgtgctgacaaggcgacttcagattccatactgagatcgttcccaggctggcgtctctggggtttttaaggctggctggagaagacagtgggagggtgccccgtctgacacccctggggttgctgagggaacggttggagtggggatcggcctgcgaaaggatactgtgaaatcactaattaactaataaacctgtctcaagttgaggatttgaanaaaaaaaaaaaaaaaaaaaaaaaaaaaaagtcgtatcgatgtcgagcgatcatgat

SEQ ID NO: 151 - DNA, 2012 bp, Homo sapiens
ccacgcgtccgggaaaaatctgtctcacccacaaagatgtgggctcagctccttctaggaatgttggccctatcaccagccattgcagaagaacttccaaactacctggtgacattaccagcccggctaaatttcccctccgttcagaaggtttgtttggacctgagccctgggtacagtgatgttaaattcacggttactctggagaccaaggacaagacccagaagttgctagaatactctggactgaagaagaggcacttacattgtatctcctttcttgtaccacctcctgctggtggcacagaagaagtggccacaatccgggtgtcgggagttggaaataacatcagctttgaggagaagaaaaaggttctaattcagaggcaggggaacggcacctttgtacagactgacaaacctctctacaccccagggcagcaagtgtatttycgcattgtcaccatggatagcaacttcgttccagtgaatgacaagtactccatggtggaactacaggatccaaatagcaacaggattgcacagtggctggaagtggtacctgagcaaggcattgtagacctgtccttccaactggcaccagaggcaatgctgggcacctacactgtggcagtggctgagggcaagacctttggtactttcagtgtggaggaatatgtgctgccgaagtttaaggtggaagtggtggaacccaaggagttatcaacggtgcaggaatctttcttagtaaaaatttgttgtaggtacacctatggaaagcccatgctaggggcagtgcasgtatctgtgtgtcagaaggcaaatacttactggtatcgagaggtggaacgggaacagcttcctgacaaatgcaggaacctctctggacagactgacaaaacaggatgtttctcagcacctgtggacatggccacctttgacctcattggatatgcgtacagccatcaaatcaatattgtggctactgttgtggaggaagggacaggtgtggaggccmatgccactcagaatatctacatttctcccaaatgggatcaatgacctttgaagacaccagcaatttttaccatccaaatttccccttcagtgggaagataagagttaggggccatgatgactccttcctcaagaaccatctagtgtttctggtgatttatggcacaaatggaaccttcaaccagaccctggttactgataacaatggcctagctccctttaccttggagacatccggttggaatgggacagacgtttctctggagggaaagtttcaaatggaagacttagtatataatccggaacaagtgccacgttactaccaaaatgcctacctgcacctgcgacccttctacagcacaacccgcagcttccttggcatccaccggctaaacggccccttgaaatgtggccagccccaggaagtgctggyggattattacatcgacccggscgatgcaagccctgaccaagagatcagcttctcctactatttaatagggaaaggaagtttggtgatggaggggcagaaacacctgaactctaagaagaaaggactgaaagcctccttctctctctcactgaccttcacttcgagactggcccctgatccttccctggtgatctatgccatttttcccagtggaggtgttgtagctgacaaaattcagttctcagtcgagatgtgctttgacaatcaggtttcccttggcttctccccctcccagcagcttccaggagcagaagtggagctgcagctgcaggcagctcccggatccctgtgtgcgctccgggcggtggatgagagtgtcttactgcttaggccagacagagagctgagcaaccgctctgtctatgggatgtttccattctggtatggtcactacccctatcaagtggctgagtatgatcagtgtccagtgtctggcccatgggactttcctcagcccctcattgacccaatgccccaagggcattcgagccagcgttccatt

SEQ ID NO: 152 - DNA, 1121 bp, Homo sapiens
  misc_feature (833)..(833): n equals a,t,g, or c
  misc_feature (838)..(838): n equals a,t,g, or c
  misc_feature (973)..(973): n equals a,t,g, or c
  misc_feature (1007)..(1007): n equals a,t,g, or c
  misc_feature (1030)..(1030): n equals a,t,g, or c
  misc_feature (1083)..(1083): n equals a,t,g, or c
ccacgcgtccgcgatccacctggacacctggaggctaagcctggattcccccttccctgactcaggaactgcttaacgtctacagcaaggcctaataggggacctgagggcacagtcctcaggatgtttcggggagaataggagccagaacctgagcccctaagccattcccctcaccaatgatggggtccccagtgagtcatctgctggccggcttctgtgtgtgggtcgtcttgggctgggtagggggctcagtccccaacctgggccctgctgagcaggagcagaaccattacctggcccagctgtttggcctgtacggcgagaatgggacgctgactgcagggggcttggcgcggcttctccacagcctggggctaggccgagttcaggggcttcgcctgggacagcatgggcctctgactggacgggctgcatccccagctgcagacaattccacacacaggccacagaaccctgagctgagtgtggatgtctgggcagggatgcctctgggtccctcagggtggggtgacctggaagagtcaaaggcccctcacctaccccgtgggccagccccctcgggcctggacctccttcacaggcttctgttgctggaccactcattggctgaccacctgaatgaggattgtctgaacggctcccagctgctggtcaattttggcttgagccccgctgctcctctgacccctcgtcagtttgctctgctgtgcccagccctgctttatcagatcgacagccgcgtctgcatcggcgctccggcccctgcacccccaggggatctactatctgscctgcttcaragtgccctngcagncctgttgctcagcctcccttctcccctatccctgctgctgctgcggctcctgggacctcgtctactacggcccttgctgggcttcctgggggccctggcggtgggcactctttgtggacatgctaccaagcctgnttcggcctccggagcccctggctacgccccatgngcttctgcaagggctggggctgntgcttggggggccgggcttaagcttggcataaaccttggttggaagaaccggntactggcccgggaacaactgaaggcttgatggggccaa

SEQ ID NO: 153 - DNA, 573 bp, Homo sapiens
acccacgcgtccgcggacgcgtgggcggacgcgtggggttgcgatgaaagttctaatctcttccctcctcctgttgctgccactaatgctgatgtccatggtctctagcagcctgaatccaggggtcgccagaggccacagggaccgaggccaggcttctaggagatggctccaggaaggcggccaagaatgtgagtgcaaagattggttcctgagagccccgagaagaaaattcatgacagtgtctgggctgccaaagaagcagtgcccctgtgatcatttcaagggcaatgtgaagaaaacaagacaccaaaggcaccacagaaagccaaacaagcattccagagcctgccagcaatttctcaaacaatgtcagctaagaagctttgctctgcctttgtaggagctctgagcgcccactcttccaattaaacattctcagccaagaagacagtgagcacacctaccagacactcttcttctcccacctcactctcccactgtacccacccctaaatcattccagtgctctcaaaaagcatgtttttcaagatcaaaaaaaaaaaaaaaggg

SEQ ID NO: 154 - DNA, 1010 bp, Homo sapiens
acccacgcgtccgcagcaatatgcatcttgcacgtctggtcggctcctgctccctccttctgctactgggggccctgtctggatgggcggccagcgatgaccccattgagaaggtcattgaagggatcaaccgagggctgagcaatgcagagagagaggtgggcaaggccctggatggcatcaacagtggaatcacgcatgccggaagggaagtggagaaggttttcaacggacttagcaacatggggagccacaccggcaaggagttggacaaaggcgtccaggggctcaaccacggcatggacaaggttgcccatgagatcaaccatggtattggacaagcaggaaaggaagcagagaagcttggccatggggtcaacaacgctgctggacaggccgggaaggaagcagacaaagcggtccaagggttccacactggggtccaccaggctgggaaggaagcagagaaacttggccaaggggtcaaccatgctgctgaccaggctggaaaggaagtggagaagcttggccaaggtgcccaccatgctgctggccaggccgggaaggagctgcagaatgctcataatggggtcaaccaagccagcaaggaggccaaccagctgctgaatggcaaccatcaaagcggatcttccagccatcaaggaggggccacaaccacgccgttagcctctggggcctcggtcaacacgcctttcatcaaccttcccgccctgtggaggagcgtcgccaacatcatgccctaaactggcatccggccttgctgggagaataatgtcgccgttgtcacatcagctgacatgacctggaggggttgggggtgggggacaggtttctgaaatccctgaagggggttgtactgggatttgtgaataaacttgatacactaaaaaaaaaaaaaaaaaaaaaaaaaaaaaaaaaaaaaaaaaaaaaaaaaaaaaaaaaaaaaaaaaaaaaaaaaaaaaaaaaaaaaaaaaaaaaaaagggggggg

SEQ ID NO: 155 - DNA, 687 bp, Homo sapiens
acccacgcgtccgcggacgcgtgggttcatagtgttcagaaagttcatttaaaaataaagctaaatttaggtcattcatctgcttacaatctaggaacacatcccaaagtcttccacatccaaacatactctaccctatggggtcctgccttctctgacttcacatattattctccctacagcacactgcattctagctcatggccttctctctggtcggaaataaaccaagcttgtttctatcccatggactgtgtgctgaatccttcctctgacaggaatgctctcccgccttcttccaccccctttttttttcttcttgtatttcattctcaggttaatgtcaccttgccagggaaaacttctctcatcactctatccaatgtctccattttcagaatatatactgaattcaaatacttcttcttctctctactgtcatttagcaacaaacttcttatcatttcttgcttggattattgcaataatttcaaaactggattgccttctttcagtcttgccctgcttccacagtttataagtataacgtcactgtgatccttttaaaacatcaccgtctaattcatgtcatttttcctcttgatatattccaagtgtaccccctgtcacatagaacaaacatcaaaataaaaaaaaaaaaaaaaaaaaaaaaaaaaaaaaaaaggg

SEQ ID NO: 156 - DNA, 1386 bp, Homo sapiens
ccacgcgtccgaaattattgagcagcatcagttcggaatgtggatggaactgttatcacacggtctttttttattgttgaaacacatccaactcttacttgtgggatggacaaagggttggtggctctatacggagccaggtgcctgctggccagcaggctgtgtgagtcatccggtcttagaggcgctggatttctctgcagtgcaggccagccctgctgctccttggtgtagggggcagagccgggcagtgccccctccagcctcccagcaatcttcgtcccgttttcgtgagattccagcagtctccagtttgaggaaagaggcccactgtgtcttgaggctgaacttcttaacccactttatttttatgtgtccttatcagaacataagcagtgtctcaaactcaggccgtttactagtcgccaccgggcaaagctaaatacaacttttataagaacctggccaacggtagttgaagtcgacccaaacattttaaactttgccaattgtactagagccggagcaggcaaatggtggtagatcttcttagcaacaaacagttagaagacggaaagggctagggttagggtcttttggtcacccagcccttacctggttttcagataagaacttggcctgttaacattttcacgtagaagtgatcttcttggtacagccgaggtcttaagcytttactgaaacactatccytagctgccttatgatttaagtgaggattatagaacttcagccctaactttttcattatgtgtatttttcttcattcatgtcaggttggatttggtctagggagtcccagaaagaagtagaaaaagagagagawkyctaccgtcggagaactgctgcttttcaacaggatctggaagccaagtacctygccatgatctcagaaaatcgttttgctgtcgctcagttgtccttggaactcgaaaaggaacaaaacagaactgctagttaccgagaagcccttatctctcagggacgcaagttggtagaagaaaagaagcttctggaacaggaacgggcccaggtgatgcaagaaaaaagacaggtgcagcctttgagaagtgcgtatttgagctgcctgcaaagggaagaaaactggcaaaggagagccaggcttttgctgaaagaatttgaagctgttctcacagaaagacagaatatctactgcagtctgtttcttcctcgcagcaagcggctggagatagagaagagcttactggtgcgagcgtccgtcgaccccgtcgccgctgacctagagatggcagccggtctcaccgacatatttcagcatgatacatactgtggtgatgtctggaacaccaacaaacgccagaatggcagactcatgtggctctat

SEQ ID NO: 157 - DNA, 569 bp, Homo sapiens; identical to SEQ ID NO: 81

SEQ ID NO: 158 - DNA, 574 bp, Homo sapiens
acccacgcgtccgtaaaacccgaaagatggagcctcaggttcgcgctctgcgttgcgggtgctggaaccgagattcaaaaagagcttccggaggttccatacaagtaaatccgaaaaaaagtgtgtgtgggggggtccacaccactaattattatggcgaggaagataaagaagacatggacagaaggcggatggctctgcggcctggctcccgcagaccgaccgccttcttcttccattcgagatggctcgtaccgaacctccttgccttcttcctgggtctctcgggggctggaccaatacatctgccgatgccctggccgaatggcaggcgacatcgggtcctggacccccacacgcagctcagtacccacgaggccccaggccgctggaagcctgtagctccgcggacgatgaaagcctgcccgcaggttctcctggagtggtgagcctctgtcggaagggggcgcccacgtctttttaatggtcctaacacaccagtggaataaatctctaagattccaaaaaaaaaaaaaaaaaaaaaaaaaaaaaaaaaaaaaaaaaaaaaaaaggg

SEQ ID NO: 159 - DNA, 1645 bp, Homo sapiens
  misc_feature (1552)..(1552): n equals a,t,g, or c
  misc_feature (1593)..(1593): n equals a,t,g, or c
  misc_feature (1603)..(1603): n equals a,t,g, or c
  misc_feature (1623)..(1623): n equals a,t,g, or c
tccttgtggtcagcccccgcgatttatggctatcagtcgcacgggcctctgctctgctgcgggcgcggsgaccgctgtgctctcgacccctcctcctgtagagagtggtgctgccctctcgggatgtacctgcaggtggagacccgcaccagctcccgcctccatctgaagagggctccaggcatccggtcctggtccctgctggttggaatcttgtcgattggcctggctgctgcctactacagcggagatagcctgggctggaagctcttctacgtcacaggctgcctgtttgtggctgtgcagaacttggaggactgggaggaagccatcttcgacaagagcacagggaaggttgttttgaagacgttcagcctctacaagaagctgctgactcttttcagagctggccacgaccaggtggtggtcctgctccatgatgtccgtgatgtgagcgtggaggaggagaaggtccggtacttcgggaaaggctacatggtggtgctccggcttgcgacgggcttctcccaccccctcacgcagagtgcagtcatgggccaccgcagtgatgtggaagccatcgccaagctcatcaccagcttcctggagctgcactgccttgagagccccacagagctgtctcagagcagcgacagtgaggccggtgaccctgcaagccagagctgacagccccactgtgcctgagcccgtgcaccgcccacaggacccatggcacattcccggtgtgcctgagcccgtgcaccgcccacaggacccgtggcacattcccggtgtgcctgagcccgtgcaccgcccacaggacccgtggcacattcccggtgtgcctgagcccgtgcaccgcccacaggacccgtggcacattcccggtgtgcctgagcccgtgcaccgcccacaggacccgtggccttggcttcagttggtgcctccagccgagttggcctattgcctgctcatgctgctgcttgcacactgcatgaaacagcaggccagaccaggacatccagactttctccatcgtgaggcctgggcctgcctttctgcagccggaggtctcgccagccctggactcctgctttgggccacagcaagacctcgggcgagtggagaggcggggccaggccgggcccttgtgggtgctgatgctgcatgttgtccccgacacagcgtcctctccctggtggacatccccagcggtcaggtgcttccccaagggcagtgaggggtgaacatccagggcctacctggctgtgcacgctgcagccacactgtggaagctgcccctccccgaggacccgcctcccttgctgatgccaggatctcggcgcatagaccactctgccccagcggtcgtcacagaaaggtctctctgttcctcacactcagcttcagcataagctgtgaggccagaaaaaaggtcagctcttctagtatcgtgcagtgcttaaaaaccgggagctccagccgggcgcagtggttcatgccagtaatcccagcacttttcggagggccgaggttgggaggatttgctttnagggccagggggtttcaaggaccaggcctgggggaaaacanaggcaaggtncctgtttttttgttaaaaanaaaattaaacccaaaacaggga

SEQ ID NO: 160 - DNA, 587 bp, Homo sapiens; identical to SEQ ID NO: 91

SEQ ID NO: 161 - DNA, 1193 bp, Homo sapiens
tgctgcccgtaataaaaatgctctcagacactggaaaaaaaaaaaaaaaaaactcaagtgtccaaggcttttcatcctaggaagtttgtgtgctggttcacaagaggtccctggcaccctttctggggatgtttggatgcggctggtaggcagggaagagaaagggcaccccagcgggggcatgtgtggaggcagcacggaacatgtaggttatagatcgtcagggaggaggggtcagttgggtgcttgtttttctgatttttggtccttgatcacccccttcccttcccacacgtgtccccagcctgcctgtggctgttccccccacaagaagcacctcccttgcttggcaaccttcaccagcatttcccaaaagtatgctcctgggaaccctagttccacaggataataggtttttcataaagaaacgtagggtgtgtatgtgaaagtggggtgaggttccctggttgagtaggtttggcagacactaaagcgagctacacgatcatctttgctacaggcctctcacaaccttcagcatgccagcatgggtcaggcctcttcacagggccaagaaactcatagcatctcccacattactctcatcacttctccaaggtgcttttgcaagactggaattccttggacaccattggagaagccccgctttttctggaacagcggcaaccaagaggccttgcagccctggaagtgggtcagggcccttggtggtcacctttttctccccagcagctctgcagaggtggcctgcttggcagtgggacatcaggggaccggtcctgctttgagatggcagggtccctgttctgagagctctccagcctgagggcattgagctgaggctccaccctgagctctcctgcagggtggagggcattgtttcccagcacccaggcagtgtcttgctggtgtgtcgtgagtgctggatgtccaagtccctgctggccacggagggctcctgcctctcttcttcagcgccacaaaattacatggaggccagctggtttgtgaggagatgtttattttttaattctttgtttaccgaacgtttactgagcatctaccctgtgccagcctatcgtacgctctgtctccaagatgaaaaaggacttctctgccctcaagggaacccacagatcttaaggagacatcatgtcgggaatgtgtggcga

SEQ ID NO: 162 - DNA, 563 bp, Homo sapiens
ccacgcgtccgctagttctagatcgcagctggattcccggagcactcatggtgaggaagccaagtggttggccctccaaggaaagggtctgtgtactgggggcgaggcgggagggcaagcccaaatgtgtcacacaagtgctgttctctagccaccagaccatcgaaaggagggagcctagaagagttggccagtggatggtgacaggcgttattctcgtctgcaccattccttctagataaagatgagggtaggggagcgttgtgctgtgtggttgttgacagcgaccggtatcttttgtttaatgaggcaacctagatgtaggcctcaattcacaatagttactaccgaaaaccagtgcagtctctcagttactctcttggcaacaaatagaaaccttttgtttaaaacagatagcattttaatgtctttggaatctgggcgagaaggaaaaacgggaagcatacaggaaaaatttccctctagtcttgaaaaaaaaattctgcttcaacactaagttagcaagaaaatgccatttctcacatagaaatttattgatgatt

SEQ ID NO: 163 - DNA, 810 bp, Homo sapiens
gtcgtacagagcagccctcccactctcaggtgctctgccgctgcaaccacctcacctactttgctgttctcatgcaactctccccagccctggtccctgcagagttgctggcacctcttacgtacatctccctcgtgggctgcagcatctccatcgtggcctcgctgatcacagtcctgctgcacttccatttcaggaagcagagtgactccttaacacgtatccacatgaacctgcatgcctccgtgctgctcctgaacatcgccttcctgctgagccccgcattcgcaatgtctcctgtgcccgggtcagcatgcacggctctggccgctgccctgcactacgcgctgctcagctgcctcacctggatggccatcgagggcttcaacctctacctcctcctcgggcgtgtctacaacatctacatccgcagatatgtgttcaagcttggtgtgctaggctggggggccccagccctcctggtgctgctttccctctctgtcaagagctcggtatacggaccctgcacaatccccgtcttcgacagctgggagaatggcacaggcttccagaacatgtccatatgctgggtgcggagccccgtggtgcacagtgtcctggtcatgggctacggcggcctcacgtccctcttcaacctggtggtgctggcctgggcgctgtggaccctgcgcaggctgcgggagcgggcggatgcaccaagtgtcagggcctgccatgacactgtcactgtgctgggcctcaccgtgctgctgggaacctgtctcttatacacatctcaacctgaagctg

SEQ ID NO: 164 - DNA, 2267 bp, Homo sapiens
  misc_feature (2252)..(2252): n equals a,t,g, or c
  misc_feature (2258)..(2258): n equals a,t,g, or c
ccacgcgtccgccagcaaggattatcagactactagaatttattggattttctgggaatagggagttgggcctcctgcagttacgtgaaggtgcttcaggaaggagcatgaggtctgcactgtgctgcttaaccatcttagcttttcatacttacatctccctaatacttggtacaggagaagtgaatgttgcggaagcagagcgtctcctggcacccttcctccagcagtttccaaatggctcactcgtgttgttttatcatgcccgaatagagttgctgaaagggaatcttgaagaggcacaagaagtatttcaaaaatgcatttcagttcaagaagaatggaaacagtttcaccatctctgctactgggagctaatgtggattaatgttttccaacaaaactggatgcaggcatattactattcagatctgctttgcaaagagagtaaatggtccaaggcaacttatgtgttcttgaaagcagcaattttgagtatgcttccagaggaggatgtagtagcaacgaatgagaatgtggtaactttattcagacaggtggacagcttgaagcagagaattgccgggaaatctatccctactgagaagtttgctgtgaggaaggctcggcgttactccgcctccttacctgcacctgtgaagctcatcttacctgccctggaaatgatgtatgtctggaatggtttttcaatagtgagcaaaagaaaagacctttctgaaaatctgttagtaactgttgaaaaagctgaggcagctttacaaagtcaaaattttaacagcttctctgtggatgatgagtgcttagtgaagttacttaaaggatgttgcctcaagaacttacagcggcccttgcaagctgaactatgttacaatcatgttgtggaaagtgaaaagctactgaagtatgaccactacctagtgccgttcactctatttgaattggcatctttgtataaaagccagggggaaattgacaaggccataaagttcctagaaactgcaaggaacaactacaaagattactccctggagtccagactacacttcagaattcaggcagctcttcacctctggagaaaaccttcctcagattgatcagaacttgaaggatggaatttttcctcaattagcatcggcatctgctatagattcaaccttatattaaagtggaaaaatgatcttgtgaataagagacaaaaaaacagtttttttggtcaatattttctatcatctgagagatttactgttggtctacataattttttttcctatggaatggcattctatattatctagaaaattcttatattttgcctcccccaaaagaatttcatattatttgaattagggggcgaagaagtcttttgaaagacttgcagatgcaatagtctaattagattatttatttttttaatgtgaaaattaatattgtttagcaaatagcttacaagttgagccaattttggatttgttgggtagttaaacttcagagatattttgttgcctgtatttaaatttcagaagataaataaatatcattgcatttaaaatagcttaacagtgaccttcagaagacttctgaaaaagacagtctgagaacatgaacacggatcgatataatgtacttcatgggttgaagagacctttctctataaaggatgatgcagtattcagttagtggttttttactcttcatttgattaaaggtggtgacgttttggagagactgattttgaatgtacttaagtctattataataacaaaattcaaaacccctgtgtatctaaagggaaggaagtgtcatattttaggaatttttcttaaccttagcaatgagagcctaaaatacatacatggattatttttcttctaggaagtaaatttcctgctgctttaaatgatatgtaaaatatcaataatttttacacttaagatgttggtaagacctagttttytaatctctctagcactgtgatgtctccttgtagataatytggaccttgcttagtcctttagttgggaaacagaatcagggcatagagcagaagagagcttgacactccatatggtcctggttctgctacccattagcgattagtgaggagacctttagggagtccactgtgccctgtgtgtcaccacattttcttctgtgaaatcaagattaaagaacagatgactttcaaggtctttttcagttttataactgtgagtctatgtattgggtatttnatttgnaaccaaatg

SEQ ID NO: 165 - DNA, 735 bp, Homo sapiens
  misc_feature (724)..(724): n equals a,t,g, or c
aattcggcagagctgcgggaagatggcggcggccatggcagcatcttccctgacggtcaccttagggcggctggcgtccgcgtgcagccacagcatcctgagaccttcggggcccggagcagcctccctttggtctgcttctcgaaggttcaattcacagagcacttcatatctaccaggatatgttcctaaaacatccctgagttcaccaccttggccagaagttgttctgccagacccagttgaggagaccagacaccatgcagaggtcgtgaagaaggtgaatgagatgatcgtcacggggcagtatggcaggctctttgccgtggtgcactttgccagccgccagtggaaggtgacctctgaagacctgatcttaattggaaatgaactagaccttgcgtgtggagagagaattcgactggagaaggtcctgctggttggggcagacaacttcacgctgcttggcaagccactcctcggaaaggatcttgttcgagtagaagccacagtcattgaaaagacagaatcatggccaagaatcattatgagattcaggaaaaggaaaaacttcaagaagaaaagaatcgtcacgaccccgcagactgtcctccggataaacagcattgagattgctccgtgtttgttgtgattaccgagttaatacttacaaaaggataaaaataaactcctgcttcccaaggaaaaaaaaaaaaaaaagggnggccgttttaa

SEQ ID NO: 166 - DNA, 4355 bp, Homo sapiens
  misc_feature (4330)..(4330): n equals a,t,g, or c
  misc_feature (4332)..(4332): n equals a,t,g, or c
gggaggaccggccggaattcccgggtcgaccacgcgtccggggctgtcgtacagagcagccctcccactctcaggtgctctgccgctgcaaccacctcacctactttgctgttctcatgcaactctccccagccctggtccctgcagagttgctggcacctcttacgtacatctccctcgtgggctgcagcatctccatcgtggcctcgctgatcacagtcctgctgcacttccatttcaggaagcagagtgactccttaacacgtatccacatgaacctgcatgcctccgtgctgctcctgaacatcgccttcctgctgagccccgcattcgcaatgtctcctgtgcccgggtcagcatgcacggctctggccgctgccctgcactacgcgctgctcagctgcctcacctggatggccatcgagggcttcaacctctacctcctcctcgggcgtgtctacaacatctacatccgcagatatgtgttcaagcttggtgtgctaggctggggggccccagccctcctggtgctgctttccctctctgtcaagagctcggtatacggaccctgcacaatccccgtcttcgacagctgggagaatggcacaggcttccagaacatgtccatatgctgggtgcggagccccgtggtgcacagtgtcctggtcatgggctacggcggcctcacgtccctcttcaacctggtggtgctggcctgggcgctgtggaccctgcgcaggctgcgggagcgggcggatgcaccaagtgtcagggcctgccatgacactgtcactgtgctgggcctcaccgtgctgctgggaaccacctgggccttggccttcttttcttttggcgtcttcctgctgccccagctgttcctcttcaccatcttaaactcgctctacggtttcttccttttcctgtggttctgctcccagcggtgccgctcagaagcagaggccaaggcacagatagaggccttcagctcctcccaaacaacacagtagtccgggcctcctggcctggaatcctcagcctctctggccgccagtagcctgaggctacggctcctgctagagagggtggcaggcctgctgctggaccccagaggccactgtgaccgccaaggggccttttccacttccacggcctctccaggcactgaggggaaggcattgctctacctctccctgacattttgctccggggcagatccaaccttacctggggcagcaaactttgtcctggtacctgggcccagctcgccagggatgtgggcagagcaccagcctgggcatcaggaagccaagtttcaaggactgtctttgagtctgtctgtatgaccttgggcctgccacttctcacagaccctaggtatccacagctgtgacatgggggcaagcggctttgtttcagcctaacccaggagcttagtaaaaattgcataagaccagggggaagagtgtcagcgtggggtgggaattcccgcggcctccacctgcttgctaggggcaggatctcattcaggctgccctggaagcacctgcttggccctgccaccttcctccaggggagggccagatggcatcctggcttggggcgggtgggacctacccaggctctgagactttactggcctatgcctgaggcctcttttcctttaactccctaaattatgatgactccaagtccaagcccacccttcccaaagattgggaggttccgccgttcccagaggctcctcctgcggtgctcccaagacttccatagaccatctggaccagtagcccatcccgcagttttcttgggggcagaggaaaacgcttctttctcctccagctgaatcagctggatcccagtgtcctggctgtttggtgattgggcaagattgaatttgcccaggtaggcgtgagagtgtgggttttaaattcgaagctcaggccatagtttcagagaatcacccttaccccagaccttcatgagacagtgctcatgaagccagtgcgtttcccagaacgaacactaggcggcaccgttggtccacactcagaggcccttggcgccaagactgcatctagaatcgctcaaacacctgtttgcagaccccatgcaccagctggaggggccgtaactgcaggactgcgcctactgagtgacccatttcctccaggaggaaaggcaagacacgcttacacggccatttgtctcttttcccaatgcggcggtgcactttcgctcttgggggctgcaccccagacatagctggcaccagagcagggtgctcaggtggtgggtgctcagggccctgccccaggccactgggccgttttgatgacctcgaaggtcacaggcagaaaataggagcaggatttcccctggggaaaagttctcctgggacatcttctgctcttctgtacatttctagatgcaaataactccttcaccaggcagtgagtggcgtaggctctggagccaggctgcctgggctccaatgccagctctgccacttgctagctgtgagactgtggacaaaccactcagcctctgtgtgcctcagttttcctatttgtaaaatagaggccatagtggtacctattttgaagactaagtaaaagaattcaaataaagagacttggcacagagtaagtgctcagtaaatggttactggtattatcattagtatttttgctattattgttaacagtgttaactgagtttcagaggccagcctgtctaagccccaggcccagctctgctcaaccttgtaggcacaaccccttcttaggcacatctcaccatgcctcagtttctttccccagacgggtctctactcccacctcgctgactttctgctgttctaggaatagtccccacacagtgcagcctccaggccatgccacatgtcccccgacctcccagttccccaatcttccggtctatagaaattcctggtggtcatttatcacatctacaaaattgccccagcggtgcctagagaaggcctctttcccacgctaactccaggcagattctccccacccctgccaccatctgggtgatgtgagcacccatccaagctcccatggttaagcccaggctctccaggccttggggcagggggtccccttgctaatgagggtcccgaggaattatgggaacctttagcccttctcttgggcagccccagggagtggggacacaggctcctgctgtggctgggtctgcatagagccccccagcccaggacccagcctctcagaccccaccaagcccagggcttgcccgagggaggatgtggccacagcgacacgggaggagactggcagttccaggaagcagccccaagcttgtggccctgagccccactggggtccgggccctgggcagggaccacttcctggaaatgtctcactgggtgtgggggagggactgagggagatagtgtggagccaggcagggcccctcttcccccttcctctctctcccagcagagcccagatggggccctggggccagctcttgggagcttccagacttagcaggaggatggaatggggtggagtctgggggctgttgttcagggccagggactcagagcaggcacttggtgaacggatgccatgtaaatgtcaacaggaccacagattaggagatttctgtgtgtggttttgttagtgttatttcagaaaagggtgtgtgcatgtgtgtgtatgggggggctattgaaaatagggttgccagataaaatatcagatgcccaatttgggagacgtactaaaacattattcattgtttacctggattcacatgtagcagggtatcctattattgatgtattttgattttgctaaacctggaagctctaatgagaagagcattggctcaggagtccggggtgtggactcttcactctctaaatccacccaggctgtgctgagggggaagcccctctgcccactggatgagtccccctcattcacagcccactcagcttgaggtgttcctattgccagccaaagccaccaccagaaatcccaaggggtctgccttgggtgtccccacccctgctgtcagccctggcgcagacctagcccccatcccctgtagaggcgccatggacctccctgcctccccactcccaattccaaattcacccagaagccagagggtgttttccatcctgcagcctgcccgtgtccacccctgcggaagcccttccacagcaccccctcttcattgycacactccccagtggaacttgaaaggcccacggtccggcttgtgtccccctctccagccgtgtcttaccactccttccccctgccctgtntncttatacactctcaaccctgaag

SEQ ID NO: 167 - DNA, 705 bp, Homo sapiens
ccacgcgtccgagagacgcggaccccagacatgaggaggctcctcctggtcaccagcctggtggttgtgctgctgtgggaggcaggtgcagtcccagcacccaaggtccctatcaagatgcaagtcaaacactggccctcagagcaggacccagagaaggcctggggcgcccgtgtggtggagcctccggagaaggacgaccagctggtggtgctgttccctgtccagaagccgaaactcttgaccaccgaggagaagccacgaggtcagggcaggggccccatccttccaggcaccaaggcctggatggagaccgaggacaccctgggccgtgtcctgagtcccgagcccgaccatgacagcctgtaccaccctccgcctgaggaggaccagggcgaggagaggccccggttgtgggtgatgccaaatcaccaggtgctcctgggaccggaggaagaccaagaccacatctaccacccccagtagggctccaggggccatcactgcccccgccctgtcccaaggcccaggctgttgggactgggaccctccctaccctgccccagctagacaaataaaccccagcaggccgggcaaaaaaaaaaaaaaaaaaaaaaaaaaaaaaaaaaaaaaaaaaaaaaaaaaaaaaaaaaaaaaaaaaaaaaaaaaaaaaaaaaaaaaaaaaaaaaaaaaaaaaaaaaaaaa

SEQ ID NO: 168 - DNA, 792 bp, Homo sapiens
  misc_feature (414)..(414): n equals a,t,g, or c
  misc_feature (540)..(540): n equals a,t,g, or c
  misc_feature (641)..(641): n equals a,t,g, or c
  misc_feature (709)..(709): n equals a,t,g, or c
  misc_feature (753)..(753): n equals a,t,g, or c
  misc_feature (782)..(782): n equals a,t,g, or c
  misc_feature (792)..(792): n equals a,t,g, or c
aagcagctggaggctctgtgtgtggcctgkagaccccacaacctccagccgkaggcctgaagcatgaggccatgccaggtgscaggagcagcgactggacccagagccatgtggctgtgccctctggccctcaacctcatcttgatggcagcctctggtgctgygtgcgaagtgaaggacgtttgtgttggaagccctggtatccccggcactcctggatcccacggcctgccaggcagggacgggagagatggtgtcaaaggagaccctggccctccaggccccatgggtccrcctggagaaayrccatgtcctcctggraatratgggctgcctggagcccctggtgtccctggagagcgtggagagaagggggaggytgcgagagaggccctccagggcttccagctcatntagatgaggagctccaagccacactccacgacttcagacatcaaatcctgcagacaaggggagccctcagtctgcagggctccataatgacagtaggagagaaggtcttctccagcaatgggcaantccatcacttttgatgccattcaggaggcatgtgccaagagcatgccggcgcattgctgtccccaaggaatccagaggaaaatgaggccattgcaagcttngtgaagaagtacaacacatatgcctatgtaggcctgactgaaggttcccagccttggagactttccgnttacttaaaatgggaacccctgtaaactacacccaactgggtanccgaggggggaagccttggcaaggtcgangggaaaaatn

SEQ ID NO: 169 - DNA, 725 bp, Homo sapiens
  misc_feature (46)..(46): n equals a,t,g, or c
ctgatgagatcaagggaatgttcagcgaaaagccgagcaggacggnccttccaagatgtgccagcttcctgggatctcactgcagcagagcgctgaggcccagcagcacaatcagcagctggggcgccgcagcggagctggagtcctgggagctggggtagtacttcttgtccgcgattctcacgcttaagacctggttttctcttctcagtcgctccacctctgcagacgcgtcctgaagcttatggtttaatgtagtgatctctccctcaagctcctccactttcttttgtccttgggccttctctgcatccagggaagccattagggccatcacagtgtggttgcaggtggcggcctgggcctccacatcctgaaagcccttctgggcctcggtcagctcttgttgcaggagatgggtgacattgcgacactccatcactgcccgaaggccgtcccggcaggcctcgctgttggccttgatggtgaagataatcaagggcacccccagaatcacgatgatcaggagcaccagaattcctatccccagcagaagcttacagcgcttatccccgtcttccatgggcactctgcaatagtcatacgaagtagatgccatccagatctcccctttagctgaaaggagtctggcctggagttaggggagggtgctggaatcttctacgggcccggacgcgtgggcggacgcgtgggcggacgcgtgg

SEQ ID NO: 170 - DNA, 923 bp, Homo sapiens
  misc_feature (6)..(6): n equals a,t,g, or c
  misc_feature (908)..(908): n equals a,t,g, or c
aacggnaaaatctccccttactattgggaacaaaagctggagctccaccgcggtggcggccgctctagaactagtggatcccccgggctgcaggaattcggcacgagccgaggaagagcgttttggggacgggggctggtgaggctcacgttggagggcttcgcgtctgcttcggagaccgtaaggatattgatgaccatgagatccctgctcagaacccccttcctgtgtggcctgctctgggccttttgtgccccaggcgccagggctgaggagcctgcagccagcttctcccaacccggcagcatgggcctggataagaacacagtgcacgaccaagagcatatcatggagcatctagaaggtgtcatcaacaaaccagaggcggagatgtcgccacaagaattgcagctccattacttcaaaatgcatgattatgatggcaataatttgcttgatggcttagaactctccacagccatcactcatgtccataaggaggaagggagtgaacaggcaccactaatgagtgaagatgaactgattaacataatagatggtgttttgagagatgatgacaagaacaatgatggatacattgactatgctgaatttgcaaaatcactgcagtagatgttatttggccatctcctggttatatacaaatgtgacccgtgataatgtgattgaacactttagtaatgcaaaataactcatttccaactactgctgcagcattttggtaaaaacctgtagcgattcgttacactggggtgagaagagataagagaaatgaaagagaagagaaatgggacatctaatagtccctaagtgctattaaataccttattggacaaggcaaaaaaaaaaaaaaaaaactcgagsgggggcccggtacccaattcggngtatgtgccgttggt

SEQ ID NO: 171 - DNA, 836 bp, Homo sapiens
  misc_feature (578)..(578): n equals a,t,g, or c
  misc_feature (795)..(795): n equals a,t,g, or c
  misc_feature (809)..(809): n equals a,t,g, or c
  misc_feature (813)..(813): n equals a,t,g, or c
cccgcgtccggctaggccctgagcccagcctccacgtctcgccgccaactccacatcctggctcctatctctgccttccaggcatctcccagctgcacgctcgggcccggctcagagccctaagccctgcctcccggtcctggccgggtttcccagaactgcacggcgcctctccgcccaggcccaagcgcgagcccctcctccacacccgagtcccagccccgcgtcccggattcggacccgcctgcctggggcggtgctgcaccaggtgcgggtgtggcaggcgtctcggagcgccaggtgcagcttcctgatcaagatggtcgccgcctgccgctcggtagccgggctcctgccacgccgccgccgytgctttcccgcccgggccccgctgctgcgcgtcgccctctgcctcctgtgctggaccccggcggctgtgtgcgcggtccctgagctcgggctctggttagagacagtcaacgacaaatcaggacctttgatatttaggaaaactatgtttaactstacagatatcaagttatctgttaagtgcattccattgttctgggcctgtgaangtttaccatagtgtggcatttgaagtatcatacctgtcacaatgagcattctaatctggaagagctgttccaaaaacataaacttagtgttgatgaagacttttgtcattatttgaagaatgacaactgttggacaacaaaaaatgaaaacttagattgcaacagtgrttyacaggtgtttccctctttgaatrataaagrrctawtaatwtccagnaatgtttcaaaccngggnaagttcatgggtgttgtagcccg

SEQ ID NO: 172 - DNA, 654 bp, Homo sapiens
ctccaagcagacacaatggtaagaatggtgcctgtcctgctgtctctgctgctgcttctgggtcctgctgtcccccaggagaaccaagatggtcgttactctctgacctatatctacactgggctgtccaagcatgttgaagacgtccccgcgtttcaggcccttggctcactcaatgacctccagttctttagatacaacagtaaagacaggaagtctcagcccatgggactctggagacaggtggaaggaatggaggattggaagcaggacagccaacttcagaaggccagggaggacatctttatggagaccctgaaagacatcgtggagtattacaacgacagtaacgggtctcacgtattgcagggaaggtttggttgtgagatcgagaataacagaagcagcggagcattctggaaatattactatgatggaaaggactacattgaattcaacaaagaaatcccagcctgggtccccttcgacccagcagcccagataaccaagcagaagtgggatgcctgtcttgagtagacttggacccaaaaaatcatctcaccttgagcccacccccaccccattgtctaatctgtagaagctaataaataatcatccctccttgcctagcaaaaaaaaaaaaaaaaaactcga

SEQ ID NO: 173 - DNA, 1230 bp, Homo sapiens
  misc_feature (1214)..(1214): n equals a,t,g, or c
aacttacgctaggtacgagcctgcggtgaaatcggccgaggatttcttcgtgctgggaatcctggccctgtcccacaccatcagccccttcatgaataagttttttccagccagctttccaaatcgacagtaccagctgctcttcacacagggttctggggaaaacaaggaagagatcatcaattatgaatttgacaccaaggacctggtgtgcctgggcctgagcagcatcgttggcgtctggtacctgctgaggaagcactggattgccaacaacctttttggcctggccttctcccttaatggagtagagctcctgcacctcaacaatgtcagcactggctgcatcctgctgggcggactcttcatctacgatgtcttctgggtatttggcaccaatgtgatggtgacagtggccaagtccttcgaggcaccaataaaattggtgtttccccaggatctgctggagaaaggcctcgaagcaaacaactttgccatgctgggacttggagatgtcgtcattccagggatcttcattgccttgctgctgcgctttgacatcagcttgaagaagaatacccacacctacttctacaccagctttgcagcctacatcttcggcctgggccttaccatcttcatcatgcacatcttcaagcatgctcagcctgccctcctatacctggtccccgcctgcatcggttttcctgtcctggtggcgctggccaagggagaagtgacagagatgttcagttatgaggagtcaaatcctaaggatccagcggcagtgacagaatccaaagagggaacagaggcatcagcatcgaaggggctggagaagaaagagaaatgatgcagctggtgcccgagcctctcagggccagaccagacagatgggggctgggcccacacaggcgtgcaccggtagagggcacaggaggccaagggcagctccaggacagggcagggggcagcaggatacctccagccaggcctctgtggcctctgtttccttctccctttcttggccctcctctgctcctccccacaccctgcaggcaaaagaaacccccagcttcccccctccccgggagccaggtgggaaaagtgggtgtgatttttagattttgtattgtggactgattttgcctcacattaaaaactcatcccatggccaaaaaaaaaaaaaaaaaaaaaaaaaaaaaaaaaaaaanaaaaaaaaaaaaaaaa

SEQ ID NO: 174 - DNA, 909 bp, Homo sapiens
tcctgctgtaggatggaagcgcctggagtgggagggaggcgcaataagacacccctcccagagcttggcatcatgggaagctggttctacctcttcctggctcctttgtttaaaggcctggctgggagccttccttttgggtgtctttctcttctccaaccaacagaaaagactgctcttcaaaggtggagggtcttcatgaaacacagctgccaggagcccaggcacagggctgggggcctggaaaaaggagggcacacaggaggagggaggagctggtagggagatgctggctttacctaaggtctcgaaacaaggagggcagaataggcagaggcctctccgtcccaggcccatttttgacagatggcgggacggaaatgcaatagaccagcctgcaagaaagacatgtgttttgatgacaggcagtgtggccgggtggaacaagcacaggccttggaatccaatggactgaatcagaaccctaggcctgccatctgtcagccgggtgacctgggtcaattttagcctctaaaagcctcagtctccttatctgcaaaatgaggcttgtgatacctgttttgaagggttgctgagaaaattaaagataagggtatccaaaatagtctacggccataccaccctgaacgtgcctaatctcgtaagctaagcagggtcaggcctggttagtacctggatggggagagtatggaaaacatacctgcccgcagttggagttggactctgtcttaacagtagcgtggcacacagaaggcactcagtaaatacttgttgaataaatgaagtagcgatttggtgtgaaaaaaaaaaaaaaaaaagcgcgcaagaaaaaacaaaaaaaaatatctcctcgtatgcgtggtaaaaaaaaaaaaaaaaaaaaaaaaa

SEQ ID NO: 175 - DNA, 942 bp, Homo sapiens
acccggggcccagcgaaccagaaggcgagacccgccgcagacgagagcaatgctggccagaagacaaaagcaaacataccgagagggcccaaaccccaggcaaccgtaacgtagaaccctcgctaaggtccaagcaacacggccatatgaccactcccacattctgctattgtaacaaaacctctttaagcaattggtgattgccatgggacttttcccatgtcttctgctgtaattatcctgtgcagaactaggaagaaatttttttcaggactgctctatggtttcctttaaaagaaaaaaacttctgtttgtttttagcagtcattatttacaatttgcagtgattaacttggcaaggcttccttccgtgtttatccctgtagccatcatttaagtcaggaacagtcagaaaaatatttattttattttttttttgggtgtctgcaaaggtaaaaatccattaaaaccttaagttaaatataaatgttacaactcaatgtttgcttttagattttatacagtatttgttttgttttggttttgagtgtatataatgcagcattagcaatatggttccaatagaggagttaaatatatattgttaaaggagacctgtagcagtcaaagattttattgatttaatgacaaaggaaattaatgaaaatgtttttgtttttctgctgtaattctgcattaagctcacatgaaaatcaygattctagagtttggaatgcaaaattaattgttttaccctcaagctgggaatatttttcaaaataaatactataatatagatatcaaattattacctccccatgttatgttgaaaatttttttattaaattgataaaactttatttccattatattcataatgttctgttatacataacattaaaatgttcattaaaatcaaaaaaaaaaaaaaaaaaaaaaaaa

SEQ ID NO: 176 - DNA, 1778 bp, Homo sapiens
gtatggactgacgatctttcattattctccgatttacatcatactatactgctccggttaaacccctgttctctaagacgttgcgtcttctagggtctttattgctgctgataacctctgttttgctttctactaactactctggctacactctactcagagacacagtgtaatactgattctgccaaaccagctaccagtagtctgtaatcatgttgccccgtaatttagggcaccaatacattggctctgctggtcagattgttccaagggaacatggttaagtcctaacacaccctggatgtcctctgtttgttcgtgttcccgtgctaaacctgccaacactaggcttgcttttgaggtaactgtcagtcccaatggccaagccaacctgggtcggtgccttgtcacccatccaccggattctttccgccmaggctcagacttgtactttgtggaagatcagccggtcccacaggctgttgtttctgatgatgcccgctgcgaagctctgcttctttcctcttggaggcraagtccaagagccatcgcttcagcgtggtgtttgcttgtccgaaaattcggtcaaacatccggttcagcagtcttggaaccacggggaagacagtgggttgaagcaccttgaggtcatccatgagcagcctgatatctccttggaaaaatccgattttagctccatgacacagcattacacactctacaactctctcaaacatatgggcgagaggcaagaaagatatcaaagtatcatctgggcaaggattgactgtattctctgttgctttcacaaaagctgaacaatcgctcactatgtttcggtgagtgaccattgctcctttggggttgcctgtagttccacttgtgaaacaaattactgcaagatcttcaggtgctggaggcttgggcttccgtctgttggctcttcccaggtcctccatcgccttcatgctggtgacttccaccccacacctctggcctcgttccaccagttcactgccgtaggcatccatgacaactatgattttaaggcctggtattaacttattttctacaccctctaataagagtttggccttctctggcttgtcaacaaaaaccagagagagttcagctttgttgactatgtacgtgatggcttcatttccaagggtatcataaagtggaacgatcaccatcgaataagcaaagcatccttgttcaataatcacccactcaggtctattttgagcaaagatgccaatgaactgatctggggcagtcttgaagcccttctgkatcagtgctgagcctatgcactccgacaattctgcaacctgtttatatgaaagccattcatagggttggtctggtttccgagagcctaaacaagggccattatttgacacctgtattcccctctggaaaccttcgtataatgttgtgacatcatcatagaaatacaccaagggctcgtcgctgtcaagtagtgcggatcttcgtgcaccaccactacccgccacttccactgactgcatggagaggtcgcatggcggcttcaggggtttgggtctcgtggcgtaccagaaggtggtgagtgctgcaaaagctccgaagcccataagcgtgttggtcggaagagtacgcacgtactgtcggaagtcaaccagctctggcattcgaaaataccggaacagctcatgggcttgcattgtcctgtgttgatagttctctaagctgaattctcctccgtggaccggccgctccgccgccggctgtca

SEQ ID NO: 177 - DNA, 1600 bp, Homo sapiens
ttgtcatggatgcctacggcagtgaactggtggaacgaggccagatgtgggggtggaagtcaccagcatgaaggcgatggaggacctgggaagagccaacagacggaagcccaagcctccagcacctgaagatcttgcagtaatttgtttcacaagtggaactacaggcaaccccaaaggagcaatggtcactcaccgaaacatagtgagcgattgttcagcttttgtgaaagcaacagagaatacagtcaatccttgcccagatgatactttgatatctttcttgcctctcgcccatatgtttgagagagttgtagagtgtgtaatgctgtgtcatggagctaaaatcggatttttccaaggagatatcaggctgctcatggatgacctcaaggtgcttcaacccactgtcttccccgtggttccaagactgctgaaccggatgtttgaccgaattttcggacaagcaaacaccacgctgaagcgatggctcttggacttygcctccaagaggaaagaagcagagcttcgcagcggcatcatcagaaacaacagcctgtgggaccggctgatcttccacaaagtacagtcgagcctgggcggaagagtccggctgatggtgacaggagccgccccggtgtctgccactgtgctgacgttcctcagagcagccctgggctgtcagttttatgaaggatacggacagacagagtgcactgccgggtgctgcctaaccatgcctggagactggaccgcaggccatgttggggccccgatgccgtgcaatttgataaaacttgttgatgtggaagaaatgaattacatggctgccgagggcgagggcgaggtgtgtgtgaaagggccaaatgtatttcagggctacttgaaggacccagcgaaaacagcagaagctttggacaaagacggctggttacacacaggggacattggaaaatggttaccaaatggcaccttgaaaattatcgaccggaaaaagcacatatttaagctggcacaaggagaatacatagcccctgaaaagattgaaaatatctacatgcgaagtgagcctgttgctcaggtgtttgtccacggagaaagcctgcaggcatttctcattgcaattgtggtaccagatgttgagacattatgttcctgggcccaaaagagaggatttgaagggtcgtttgaggaactgtgcagaaataaggatgtcaaaaaagctatcctcgaagatatggtgagacttgggaaggattctggtctgaaaccatttgaacaggtcaaaggcatcacattgcaccctgaattattttctatcgacaatggccttctgactccaacaatgaaggcgaaaaggccagagctgcggaactatttcaggtcgcagatagatgacctctattccactatcaaggtttagtgtgaagaagaaagctcagaggaaatggcacagttccacaatctcttctcctgctgatggccttcatgttgttaattttgaatacagcaagtgtagggaaggaagcgttcgtgtttgacttgtccattcggggttcttctcataggaatgctagaggaaacacaacactgccttaca

SEQ ID NO: 178 - DNA, 1388 bp, Homo sapiens
  misc_feature (1)..(1): n equals a,t,g, or c
  misc_feature (1381)..(1382): n equals a,t,g, or c
  misc_feature (1388)..(1388): n equals a,t,g, or c
nattcccgggtcgacccacgcgtccggcatgggtggcctcatcatcctcttcctcatcgccatcatctggttcccgctgctcttcatgtcgctggtgcgctccgtggttggggttgtcaaccagcccatcgatgtcaccgtcaccctcaagctgggmggctatgagccgctgttcaccatgagcgcccagcagccgtccatcatccccttcacggcccaggcctatgaggagctgtcccggcagtttgacccccagccgctggccatgcagttcatcagccagtacagccctgaggacatcgtcacggcgcagattgagggcagctccggggcgctgtggcgcatcagtccccccagccgtgcccagatgaagcgggagctctacaacggcacggccgacatcaccctgcgcttcacctggaacttccagagggacctggcgaagggaggcactgtggagtatgccaacgagaagcacatgctggccctggcccccaacagcactgcacggcggcagctggccagcctgctcgagggcacctcggaccagtctgtggtcatccccaatctcttccccaagtacatccgtgcccccaacgggcccgaagccaaccctgtgaagcagctgcagcccaatgaggaggccgactacctcggcgtgcgtatccagctgcggagggagcagggtgcgggggccaccggcttcctcgaatggtgggtcatcgagctgcaggagtgccggaccgactgcaacctgctgcccatggtcattttcagtgacaaggtcagcccaccgagcctcggcttcctggctggctacggcatcatggggctgtacgtgtccatcgtgctggtcatcggcaagttcgtgcgcggattcttcagcgagatctcgcactccattatgttcgaggagctgccgtgcgtggaccgcatcctcaagctctgccaggacatcttcctggtgcgggagactcgggagctggagctggaggaggagttgtacgccaagctcatcttcctctaccgctcaccggagaccatgatcaagtggactcgtgagaaggagtaggagctgctgctggcgcccgagagggaaggagccggcctgctgggcagcgtggccacaaggggcggcactcctcaggccgggggagccactgccccgtccaaggccgccagctgtgatgcatcctcccggcctgcctgagccctgatgctgctgtcagagaaggacactgcgtccccacggcctgcgtggcgctgccgtcccccacgtgtactgtagagttttttttttaattaaaaaatgttttatttatacaaatggaaaaaaaaaaaaaaaaaaaaaaaaaaaaaaaaaaaaaaaaaaaaagggggnncccccn

SEQ ID NO: 179 - DNA, 666 bp, Homo sapiens
ccacgcgtccgggagaacatgcagctcggcactgggctcctgctggccgccgtcctgagcctgcagctggctgcagccgaagccatatggtgtcaccagtgcacgggcttcggagggtgctcccatggatccagatgcctgagggactccacccactgtgtcaccactgccacccgggtcctcagcaacaccgaggatttgcctctggtcaccaagatgtgccacataggctgccccgatatccccagcctgggcctgggcccctacgtatccatcgcttgctgccagaccagcctctgcaaccatgactgacggctgccctcctccaggcccccggacgctcagcccccacagcccccacagcctggcgccagggctcacggccgcccctccctcgagactggccagcccacctctcccggcctctgcagccaccgtccagcaccgcttgtcctagggaagtcctgcgtggagtcttgcctcaatctgctgccgtccaagcctggggcccatcgtgcctgccgccccttcaggtcccgacctccccacaataaaatgtgattggatcgtgtggtacaaaaaaaaaaaaaaaaaaaaaaaaaaaaaaaaaaaaaaaaaaaaaaaaaaaaaaaaaaaaaaaaaaaaaaaaaaaaaaaaaaaaaaagg

SEQ ID NO: 180 - DNA, 750 bp, Homo sapiens
ccacgcgtccgcggacgcgtgggcggacgcgtggggttgcgatgaaagttctaatctcttccctcctcctgttgctgccactaatgctgatgtccatggtctctagcagcctgaatccaggggtcgccagaggccacagggaccgaggccaggcttctaggagatggctccaggaaggcggccaagaatgtgagtgcaaagattggttcctgagagccccgagaagaaaattcatgacagtgtctgggctgccaaagaagcagtgcccctgtgatcatttcaagggcaatgtgaagaaaacaagacaccaaaggcaccacagaaagccaaacaagcattccagagcctgccagcaatttctcaaacaatgtcagctaagaagctttgctctgcctttgtaggagctctgagcgcccactcttccaattaaacattctcagccaagaagacagtgagcacacctaccagacactcttcttctcccacctcactctcccactgtacccacccctaaatcattccagtgctctcaaaaagcatgtttttcaagatcattttgtttgttgctctctctagtgtcttcttctctcgtcagtcttagcctgtgccctccccttacccaggcttaggcttaattacctgaaagattccaggaaactgtagcttcctagctagtgtcatttaaccttaaatgcaatcaggaaagtagcaaacagaagtcaataaatatttttaaacagaaaaaaaaaa

SEQ ID NO: 181 - DNA, 644 bp, Homo sapiens
ccacgcgtccgcagcaatatgcatcttgcacgtctggtcggctcctgctccctccttctgctactgggggccctgtctggatgggcggccagcgatgaccccattgagaaggtcattgaagggatcaaccgagggctgagcaatgcagagagagaggtgggcaaggccctggatggcatcaacagtggaatcacgcatgccggaagggaagtggagaaggttttcaacggacttagcaacatggggagccacaccggcaaggagttggacaaaggcgtccaggggctcaaccacggcatggacaaggttgcccatgagatcaaccatggtattggacaagcaggaaaggaagcagagaagcttggccatggggtcaacaacgctgctggacaggccgggaaggaagcagacaaagcggtccaagggttccacactggggtccaccaggctgggaaggaagcagagaaacttggccaaggggtcaaccatgctgctgaccaggctggaaaggaagtggagaagcttggccaaggtgcccaccatgctgctggccaggccgggaaggagctgcagaatgctcataatggggtcaaccaagccagcaaggaggccaaccagctgctgaatggcaaccatcaaagcgg

SEQ ID NO: 182 - DNA, 681 bp, Homo sapiens
ccacgcgtccgcggacgcgtgggttcatagtgttcagaaagttcatttaaaaataaagctaaatttaggtcattcatctgcttacaatctaggaacacatcccaaagtcttccacatccaaacatactctaccctatggggtcctgccttctctgacttcacatattattctccctacagcacactgcattctagctcatggccttctctctggtcggaaataaaccaagcttgtttctatcccatggactgtgtgctgaatccttcctctgacaggaatgctctcccgccttcttccaccccctttttttttcttcttgtatttcattctcaggttaatgtcaccttgccagggaaaacttctctcatcactctatccaatgtctccattttcagaatatatactgaattcaaatacttcttcttctctctactgkcatttagcaacaaacttcttatcatttcttgcttggattattgcaataatttcmaaactggattgccttctttagtcttgccctgcttcmcagtttataagtataacgtcactgtgatccttttaaaacatcaccgtctaattcatgtcatttttcctcttgatatattccaagtgtaccccctgtcacatagaacaaacatcaaaataaaaaaaaaaaaaaaaaaaaaaaaaaaaaaaaaaag

SEQ ID NO: 183 - DNA, 692 bp, Homo sapiens
gtcgacccacgcgtccgcggacgcgtgggttcatagtgttcagaaagttcatttaaaaataaagctaaatttaggtcattcatctgcttacaatctaggaacacatcccaaagtcttccacatccaaacatactctaccctatggggtcctgccttctctgacttcacatattattctccctacagcacactgcattctagctcatggccttctctctggtcggaaataaaccaagcttgtttctatcccatggactgtgtgctgaatccttcctctgacaggaatgctctcccgccttcttccaccccctttttttttcttcttgtatttcattctcaggttaatgtcaccttgccagggaaaacttctctcatcactctatccaatgtctccattttcagaatatatactgaattcaaatacttcttcttctctctactgtcatttagcaacaaacttcttatcatttcttgcttggattattgcaataatttcaaaactggattgccttctttcagtcttgccctgcttccacagtttataagtataacgtcactgtgatccttttaaaacatcaccgtctaattcatgtcatttttcctcttgatatattccaagtgtaccccctgtcacatagaacaaacatcaaaataaaaaaaaaaaaaaaaaaaaaaaaaaaaaaaaaaagggc

SEQ ID NO: 184 - DNA, 1418 bp, Homo sapiens
tttttttttttcacttggtatttcccctttatggagtgagagagatctttaaaatataaacccttgataatataatattactacttyctattacctgttatgcagttctacacattatctgacaaattcttaatgtaatctggtgacagagaaaaataatttgaggagaaagtatttagggagtgatgaaacagacagaaaattacttgtggtaaggaccagtattgtatttgactttttaaaaaaccatttttaccctggagctaaaatacgaggttatactgttctgcttaatacaatactggcagcctaaaaatgcttcaagaaaccatatccccaacagcggcagagcatcgggaggagaccctctgtctctgaggcttcggtgcacttctgctcagacggtggcgggagtggaggtcgctgctgaagggtgacggtgtggccatgacacgggcagcacgggaacggaagacgccggagacccagaaggcgcatgactgcctggcctcgagtcactaaaagcagtttgatttcactcttgtcttacttttctagtatggcttcctctactctcttaaacttcttcagttcgacaacgagttcccagtatttgagatagagccacatgagtctgccattctggcgtttgttggtgttccagacatcaccacagtatgtatcatgctgaaatatgtcggtgagaccggctgccatctctaggtcagcggcgacggggtcgacggacgctcgcaccagtaagctcttctctatctccagccgcttgctgcgaggaagaaacagactgcagtagatattctgtctttctgtgagaacagcttcaaattctttcagcaaaagcctggctctcctttgccagttttcttccctttgcaggcagctcaaatacgcacttctcaaaggctgcacctgtcttttttcttgcatcacctgggcccgttcctgttccagaagcttcttttcttctaccaacttgcgtccctgagagataagggcttctcggtaactagcagttctgttttgttccttttcgagttccaaggacaactgagcgacagcacgccgattttctgagatcatggcgtggtacttggcttccagatcctgttgaaaagcagcagttctccgacggtaggcttctctctctttttctacttctttctgggactccctagaccaaatccaacgaaaagcagccaatcccagcattggaaccaacagggcataattccacctgcttccatcaccaccatccgccctggaattaggccggatattccaatttgggggatcatttaggttattcatggagatatacctcggtcggggagcgcgggacctcagcgttcccttaacgccaccgtccgcgggtccgctttgcgcaggcgcggcgcccc

SEQ ID NO: 185 - DNA, 552 bp, Homo sapiens
aatttcaaaaacaacgaaaccttcttttgccccctccgcagcagtcgcctccgggctttattgcaagtttacggttccatacaagtaaatccgaaaaaaagtgtgtgtgggggggtccacaccactaattattatggcgaggaagataaagaagacatggacagaaggcggatggctctgcggcctggctcccgcagaccgaccgccttcttcttccattcgagatggctcgtaccgaacctccttgccttcttcctgggtctctcgggggctggaccaatacatctgccgatgccctggccgaatggcaggcgacatcgggtcctggacccccacacgcagctcagtacccacgaggccccaggccgctggaagcctgtagctccgcggaggatgaaagcctgcccgcaggttctcctggagtggtgagcctctgtcggaagggggcgcccacgtctttttaatggtcctaacacaccagtggaataaatctctaagattccaaaaaaaaaaaaaaaaaaaaaaaaaaaaaaaaaaaaaaaaaaaaaaaag

SEQ ID NO: 186 - DNA, 528 bp, Homo sapiens
ccacgcgtccgtaaaacccgaaagatggagcctcaggttcgcgctctgcgttgcgggtgctggaaccgagattcaaaaagagcttccggaggttccatacaagtaaatccgaaaaaaagtgtgtgtgggggggtccacaccactaattattatggcgaggaagataaagaagacatggacagaaggcggatggctctgcggcctggctcccgcagaccgaccgccttcttcttccattcgagatggctcgtaccgaacctccttgccttcttcctgggtctctcgggggctggaccaatacatctgccgatgccctggccgaatggcaggcgacatcgggtcctggacccccacacgcagctcagtacccacgaggccccaggccgctggaagcctgtagctccgcggacgatgaaagcctgcccgcaggttctcctggagtggtgagcctctgtcggaagggggcgcccacgtctttttaatggtcctaacacaccagtggaataaatctctaagattccaaaaaaa

SEQ ID NO: 187 - DNA, 429 bp, Homo sapiens
agattttctgcagaaattgagttccagcctctctcgaacctgggaagacctggcaggagggggctgggctttcggstwcagacttctccccwccccgtaggagctgaacgccarccatcctgamccgccagtgctcttggtctcctgagtgtacccaggtcctcccaggtkcggtgtgcwccgagcgcgcctggcctgatgccctggcctgtgagctggggactcctgggccctgtgagcccctaggcggcaggcccaggaatggctgggtaggacagggaacmcctttkccccacgtctggctgtgacctcggtgaaarccramaaaaaaaagatggggccctcctcctcagtagtggctgccagtccctcgttgcaggacagggtcatcataaccataaataacccttcacgtgtccaaaaaaaaaa

SEQ ID NO: 188 - DNA, 622 bp, Homo sapiens
gagaacatgcagctcggcactgggctcctgctggccgccgtcctgagcctgcagctggctgcagccgaagccatatggtgtcaccagtgcacgggcttcggagggtgctcccatggatccagatgcctgagggactccacccactgtgtcaccactgccacccgggtcctcagcaacaccgaggatttgcctctggtcaccaagatgtgccacataggctgccccgatatccccagcctgggcctgggcccctacgtatccatcgcttgctgccagaccagcctctgcaaccatgactgacggctgccctcctccaggcccccggacgctcagcccccacagcccccacagcctggcgccagggctcacggccgcccctccctcgagactggccagcccacctctcccggcctctgcagccaccgtccagcaccgcttgtcctagggaagtcctgcgtggagtcttgcctcaatctgctgccgtccaagcctggggcccattgtgcctgccgccccttcaggtcccgacctccccacaataaaatgtgattggatcgtgtggtaaaaaaaaaaaaaaaaaaaaaaaaaaaaaaaaaaaaaaaaaaaaaaaaaaaaaaaaggg

SEQ ID NO: 189 - DNA, 634 bp, Homo sapiens
ccacgcgtccgccaggagaacatgcagctcggcactgggctcctgctggccgccgtcctgagcctgcagctggctgcagccgaagccatatggtgtcaccagtgcacgggcttcggagggtgctcccatggatccagatgcctgagggactccacccactgtgtcaccactgccacccgggtcctcagcaacaccgaggatttgcctctggtcaccaagatgtgccacataggctgccccgatatccccagcctgggcctgggcccctacgtatccatcgcttgctgccagaccagcctctgcaaccatgactgacggctgccctcctccaggcccccggacgctcagcccccacagcccccacagcctggcgccagggctcacggccgcccctccctcgagactggccagcccacctctcccggcctctgcagccaccgtccagcaccgcttgtcctagggaagtcctgcgtggagtcttgcctcaatctgctgccgtccaagcctggggcccattgtgcctgccgccccttcaggtcccgacctccccacaataaaatgtgattggatcgtgtggtaaaaaaaaaaaaaaaaaaaaaaaaaaaaaaaaaaaaaaaaaaaaaaaaaaaaaaaa

SEQ ID NO: 190 - DNA, 900 bp, Homo sapiens
  misc_feature (50)..(50): n equals a,t,g, or c
ctagatcgtcagggaggaagggtcagttgggtgcctgtttttctgttttnagtcctttaaaatgagtagaagcaacctgttaccctggaaagagcactggacatagacctagtgctgcgtgatgttgagcacgtttcttcttccctttgagtcccagtttcccttttggttacagggggatagtagcccccagggatcatgtgaaagtgagaaagcccttttcacactgtggagcggtgcagatgtgggaaacctcaaagatggttgcccattttaaatcctttcatctctcatctctctttcttctctcccttctgccctgacgtagccatggttgggtgggtgaggccagaagaaactgcctccggcaagaggtagcagccgctcaggtggctctgctggcatcggagcccacagaagtgaggagtggccgatggacctgccctccaaatgtgcctgactctgggtcttgctgtcactggatttcctggcatggcagacagaaagaaagatagtttgaccaagtcgtagaagctgatccagcgggtaaaaagggggcagggaactcgtcccttttattcttgcctcagagctgcctgaagacatgggccaggccggaggctggacaactttggataacgctgacctgtacttccaagtaaatgcctcctgaagagcccgggacccttcctgggagaattctgcagccagaatgaaggtgccatcagcaggaggcactgtgaagcaccatcctgtcgctgtccttgtccattcctagcaagttaatcgtgtcttgttaaccagcagttcctgttcaacgtgtaaagagacctgatgttttccctaataaagctgataacagatttrmaaaaaaaaaaaaaaaaaaaaaaaaaaaaagtc

SEQ ID NO: 191 - DNA, 757 bp, Homo sapiens
  misc_feature (5)..(6): n equals a,t,g, or c
  misc_feature (684)..(684): n equals a,t,g, or c
  misc_feature (734)..(734): n equals a,t,g, or c
ttttnncaaaaaagcttatttttaggttgacacttattagaagttacgccttgcaggttaccggttccggaatycccgggkcgaaccccaaggrrttcgcggaccccagacatgaggaggctcctcctggtcaccagcctggtggttgtgctgctgtgggaggcaggtgcagtcccagcacccaaggtccctatcaagatgcaagtcaaacactggccctcagagcaggacccagagaaggcctggggcgcccgtgtggtggagcctccggagaaggacgaccagctggtggtgctgttccctgtccagaagccgaaactcttgaccaccgaggagaagccacgaggcaccaaggcctggatggagaccgaggacaccctgggccgtgtcctgagtcccgagcccgaccatgacagcctgtaccaccctccgcctgaggaggaccagggcgaggagaggccccggttgtgggtgatgccaaatcaccaggtgctcctgggaccggaggaagaccaagaccacatctaccacccccagtagggctccaggggccatcactgcccccgccctgtcccaaggcccaggctgttgggactgggaccctccctaccctgccccagctagacaaataaaccccagcaggccgggcgcggtgctmacttgtatccagactttagagccagnagcgatactaatagagtcaacagctgcactgtaaccgttcaaatcaatancgaaaaaaaactagggccgccat

SEQ ID NO: 192 - DNA, 618 bp, Homo sapiens
tccctgagcactctctacagagacgcggaccccagacatgaggaggctcctcctggtcaccagcctggtggttgtgctgctgtgggaggcaggtgcagtcccagcacccaaggtccctatcaagatgcaagtcaaacactggccctcagagcaggacccagagaaggcctggggcgcccgtgtggtggagcctccggagaaggacgaccagctggtggtgctgttccctgtccagaagccgaaactcttgaccaccgaggagaagccacgaggtcagggcaggggccccatccttccaggcaccaaggcctggatggagaccgaggacaccctgggccgtgtcctgagtcccgagcccgaccatgacagcctgtaccaccctccgcctgaggaggaccagggcgaggagaggccccggttgtgggtgatgccaaatcaccaggtgctcctgggaccggaggaagaccaagaccacatctaccacccccagtagggctccaggggccatcactgcccccgccctgtcccaaggcccaggctgttgggactgggaccctccctaccctgccccagctagacaaataaaccccagcaggccgggaaaaaaaaaaaaaaaaa

SEQ ID NO: 193 - protein, 491 aa, Homo sapiens
  SITE (2): Xaa equals any of the naturally occurring L-amino acids
MXLLWGLLVLSWSCLQGPCSVFSPVSAMEPLGRQLTSGPNQEQVSPLTLLKLGNQEPGGQTALKSPPGVCSRDPTPEQTHRLARAMMAFTADLFSLVAQTSTCPNLILSPLSVALALSHLALGAQNHTLQRLQQVLHAGSGPCLPHLLSRLCQDLGPGAFRLAARMYLQKGFPIKEDFLEQSEQLFGAKPVSLTGKQEDDLANINQWVKEATEGKIQEFLSGLPEDTVLLLLNAIHFQGFWRNKFDPSLTQRDSFHLDEQFTVPVEMMQARTYPLRWFLLEQPEIQVAHFPFKNNMSFVVLVPTHFEWNVSQVLANLSWDTLHPPLVWERPTKVRLPKLYLKHQMDLVATLSQLGLQELFQAPDLRGISEQSLVVSGVQHQSTLELSEVGVEAAAATSIAMSRMSLSSFSVNRPFLFFIFEDTTGLPLFVGSVRNPNPSAPRELKEQQDSPGNKDFLQSLKGFPRGDKLFGPDLKLVPPMEEDYPQFGSPK

SEQ ID NO: 194 - protein, 167 aa, Homo sapiens
MVLLWGLLVLSWSCLQGPCSVFSPVSAMEPLGRQLTSGPNQEQVSPLTLLKLGNQEPGGQTALKSPPGVCSRDPTPEQTHRLARAMMAFTADLFSLVAQTSTCPNLILSPLSVALALSHLALGAQNHTLQRLQQVLHAGSGPCLPHLLSRLCQDLGPGAFRLAARMY

SEQ ID NO: 195 - protein, 162 aa, Homo sapiens
MIILIYLFLLLWEDTQGWGFKDGIFHNSIWLERAAGVYHREARSGKYKLTYAEAKAVCEFEGGHLATYKQLEAARKIGFHVCAAGWMAKGRVGYPIVKPGPNCGFGKTGIIDYGIRLNRSERWDAYCYNPHAKECGGVFTDPKRIFKSPGFPNEYEDNQICY

SEQ ID NO: 196 - protein, 133 aa, Homo sapiens
MSARLPVLSPPRWPRLLLLSLLLLGAVPGPRRSGAFYLPGLAPVNFCDEEKKSDECKAEIELFVNRLDSVESVLPYEYTAFDFCQASEGKRPSENLGQVLFGERIEPSPYKFTFNKKETCKLVCTKTYHTEKA

SEQ ID NO: 197 - protein, 270 aa, Homo sapiens
  SITE (50): Xaa equals any of the naturally occurring L-amino acids
MHGSCSFLMLLLPLLLLLVATTGPVGALTDEEKRLMVELHNLYRAQVSPXASDMLHMRWDEELAAFAKAYARQCVWGHNKERGRRGENLFAITDEGMDVPLAMEEWHHEREHYNLSAATCSPGQMCGHYTQVVWAKTERIGCGSHFCEKLQGVEETNIELLVCNYEPPGNVKGKRPYQEGTPCSQCPSGYHCKNSLCEPIGSPEDAQDLPYLVTEAPSFRATEASDSRKMGAEGPDKPSVVSGLNSGPGHVWGPLLGLLLLPPLVLAGIF

SEQ ID NO: 198 - protein, 252 aa, Homo sapiens
MRAPLLPPAPVVLSLLILGSGHYAAGLDLNDTYSGKREPFSGDHSADGFEVTSRSEMSSGSEISPVSEMPSSSEPSSGADYDYSEEYDNEPQIPGYIVDDSVRVEQVVKPPQNKTESENTSDKPKRKKKGGKNGKNRRNRKKKNPCNAEFQNFCIHGECKYIEHLEAVTCKCQQEYFGERCGEKSMKTHSMIDSSLSKIALAAIAAFMSAVILTAVAVITVQLRRQYVRKYEGEAEERKKLRQENGNVHAIA

SEQ ID NO: 199 - protein, 133 aa, Homo sapiens
MWLCPLALNLILMAASGAACEVKDVCVGSPGIPGTPGSHGLPGRDGRDGVKGDPGPPGPMGPPGETPCPPGNNGLPGAPGVPGERGEKGEAGERGPPGLPAHLDEELQATLHDFRHQILQTRGALSLQGSIMT

SEQ ID NO: 200 - protein, 149 aa, Homo sapiens
  SITE (50): Xaa equals any of the naturally occurring L-amino acids
  SITE (122): Xaa equals any of the naturally occurring L-amino acids
  SITE (138): Xaa equals any of the naturally occurring L-amino acids
  SITE (143): Xaa equals any of the naturally occurring L-amino acids
MWLCPLALNLILMAASGAVCEVKDVCVGSPGIPGTPGSHGLPGRDGRDGXKGDPGPPGPMGPPGEMPCPPGNDGLPGAPGIPGECGEKGEPGERGPPGLPAHLDEELQATLHDFRHQILQTXGALSLQGSIMTVGEKXFSSNXQSITFD

SEQ ID NO: 201 - protein, 269 aa, Homo sapiens
MIRTLLLSTLVAGALSCGVSTYAPDMSRMLGGEEARPNSWPWQVSLQYSSNGKWYHTCGGSLIANSWVLTAAHCISSSRTYRVGLGRHNLYVAESGSLAVSVSKIVVHKDWNSNQISKGNDIALLKLANPVSLTDKIQLACLPPAGTILPNNYPCYVTGWGRLQTNGAVPDVLQQGRLLVVDYATCSSSAWWGSSVKTSMICAGGDGVISSCNGDSGGPLNCQASDGRWQVHGIVSFGSRLGCNYYHKPSVFTRVSNYIDWINSVIANN

SEQ ID NO: 202 - protein, 144 aa, Homo sapiens
  SITE (124): Xaa equals any of the naturally occurring L-amino acids
MLALLCSCLLLAAGASDAWTGEDSAEPNSDSAEWIRDMYAKVTEIWQEVMQRRDDDGALHAACQVQPSATLDAAQPRVTGVVLFRQLAPRAKLDAFFALEGFPTEPNSSSRAIHVHQFGDLSQXCESTGPHYNPLAVPNPKQPG

SEQ ID NO: 203 - protein, 604 aa, Homo sapiens
MRRCNSGSGPPPSLLLLLLWLLAVPGANAAPRSALYSPSDPLTLLQADTVRGAVLGSRSAWAVEFFASWCGHCIAFAPTWKALAEDVKAWRPALYLAALDCAEETNSAVCRDFNIPGFPTVRFFKAFTKNGSGAVFPVAGADVQTLRERLIDALESHHDTWPPACPPLEPAKLEEIDGFFARNNEEYLALIFEKGGSYLGREVALDLSQHKGVAVRRVLNTEANVVRKFGVTDFPSCYLLFRNGSVSRVPVLMESRSFYTAYLQRLSGLTREAAQTTVAPTTANKIAPTVWKLADRSKIYMADLESALHYILRIEVGRFPVLEGQRLVALKKFVAVLAKYFPGRPLVQNFLHSVNEWLKRQKRNKIPYSFFKTALDDRKEGAVLAKKVNWIGCQGSEPHFRGFPCSLWVLFHFLTVQAARQNVDHSQEAAKAKEVLPAIRGYVHYFFGCRDCASHFEQMAAASMHRVGSPNAAVLWLWSSHNRVNARLAGAPSEDPQFPKVQWPPRELCSACHNERLDVPVWDVEATLNFLKAHFSPSNIILDFPAAGSAARRDVQNVAAAPELAMGALELESRNSTLDPGKPEMMKSPTNTTPHVPAEGPELI

SEQ ID NO: 204 - protein, 189 aa, Homo sapiens
  SITE (160): Xaa equals any of the naturally occurring L-amino acids
MVMLLLLLSALAGLFGAAEGQAFHLGKCPNPPVQENFDVNKYLGRWYEIEKIPTTFENGRCIQANYSLMENGKIKVLNQELRADGTVNQIEGEATPVNLTEPAKLEVKFSWFMPSAPYWILATDYENYALVYSCTCIIQLFHVDFAWILARNPNLPPETXDSLKNILTSNNIDVKKMTVTDQVNCPKLS

SEQ ID NO: 205 - protein, 135 aa, Homo sapiens
MWLCPLALNLILMAASGAVCEVKDVCVGSPGIPGTPGSHGLPGRDGRDGLKGDPGPPGPMGPPGEMPCPPGNDGLPGAPGIPGECGEKGEPGERGPPGLPAHLDEELQATLHDFRHQILQTRGALSLQGFIMTAR

SEQ ID NO: 206 - protein, 164 aa, Homo sapiens
MSRLRALLGLGLLVAGSRLPRIKSQTIACRSGPTWWGPQRLNSGGRWDSEVMASTVVKYLSQEEAQAVDQELFNEYQFSVDQLMELAGLSCATAIAKAYPPTSMSRSPPTVLVICGPGNNGGDGLVCARHLKLFGYEPTIYYPKRPNKPLFTALVTQCQKMDIP

SEQ ID NO: 207 - protein, 245 aa, Homo sapiens
MDVGPSSLPHLGLKLLLLLLLLPLRGQANTGCYGIPGMPGLPGAPGKDGYDGLPGPKGEPGIPAIPGIRGPKGQKGEPGLPGHPGKNGPMGPPGMPGVPGPMGIPGEPGEEGRYKQKFQSVFTVTRQTHQPPAPNSLIRFNAVLTNPQGDYDTSTGKFTCKVPGLYYFVYHASHTANLCVLLYRSGVKVVTFCGHTSKTNQVNSGGVLLRLQVGEEVWLAVNDYYDMVGIQGSDSVFSGFLLFPD

SEQ ID NO: 208 - protein, 120 aa, Homo sapiens
MPGPCLSQQHPFLSLSLFPFCLWICLARVPGVRNICKTQPAPSQPSLLGLGLSHPAAGTTDAGTQSLPRSQHKCTSALWGLCPAQRPLLLPAHIHSQGTAPLKNSRVTCLIGSQQVPLCL

SEQ ID NO: 209 - protein, 151 aa, Homo sapiens
MRRLLLVTSLVVVLLWEAGAVPAPKVPIKMQVKHWPSEQDPEKAWGARVVEPPEKDDQLVVLFPVQKPKLLTTEEKPRGQGRGPILPGTKAWMETEDTLGRVLSPEPDHDSLYHPPPEEDQGEERPRLWVMPNHQVLLGPEEDQDHIYHPQ

SEQ ID NO: 210 - protein, 186 aa, Homo sapiens
MPLFFSALLVLLLVALSALFLGRWLVVRLATKWCQRKLQAELKIGSFRFFWIQNVSLKFQQHQQTVEIDNLWISSKLLSHDLPHYVALCFGEVRIRTDLQKVSDLSAPFSQSAGVDQKELSFSPSLLKIFCQLFSIHVDAINIMVLKVDTSESLWHIQISRSRFLLDSDGKRLICEVSLCKINSKF

SEQ ID NO: 211 - protein, 234 aa, Homo sapiens
  SITE (132): Xaa equals any of the naturally occurring L-amino acids
  SITE (223): Xaa equals any of the naturally occurring L-amino acids
  SITE (224): Xaa equals any of the naturally occurring L-amino acids
MKPLVLLVALLLWPSSVPAYPSITVTPDEEQNLNHYIQVLENLVRSVPSGEPGREKKSNSPKHVYSIASKGSKFKELVTHGDASTENDVLTNPISEETTTFPTGGFTPEIGKKKHTESTPFWSIKPNNVSIXLHAEEPYIENEEPEPEPEPAAKQTEAPRMLPVVTESSTSPYVTSYKSPVTTLDKSTGIGISTESEDVPQLSGETAIEKPEGVWEAPRELGXXDDILKKILGY

SEQ ID NO: 212 - protein, 116 aa, Homo sapiens
MASTVVAVGLTIAAAGFAGRYVLQAMKHMEPQVKQVFQSLPKSAFSGGYYRGGFEPKMTKREAALILGVSPTANKGKIRDAHRRIMLLNHPDKGGSPYIAAKINEAKDLLEGQAKK

SEQ ID NO: 213 - protein, 610 aa, Homo sapiens
  SITE (199): Xaa equals any of the naturally occurring L-amino acids
MSARLPVLSPPRWPRLLLLSLLLLGAVPGPRRSGAFYLPGLAPVNFCDEEKKSDECKAEIELFVNRLDSVESVLPYEYTAFDFCQASEGKRPSENLGQVLFGERIEPSPYKFTFNKKETCKLVCTKTYHTEKAEDKQKLEFLKKSMLLNYQHHWIVDNMPVTWCYDVEDGQRFCNPGFPIGCYITDKGHAKDACVISSXFHERDTFYIFNHVDIKIYYHVVETGSMGARLVAAKLEPKSFKHTHIDKPDCSGPPMDISNKASGEIKIAYTYSVSFEEDDKIRWASRWDYILESMPHTHIQWFSIMNSLVIVLFLSGMVAMIMLRTLHKDIARYNQMDSTEDAQEEFGWKLVHGDIFRPPRKGMLLSVFLGSGTQILIMTFVTLFFACLGFLSPANRGALMTCAVVLWVLLGTPAGYVAARFYKSFGGEKWKTNVLLTSFLCPGIVFADFFIMNLILWGEGSSAAIPFGTLVAILALWFCISVPLTFIGAYFGFKKNAIEHPVRTNQIPRQIPEQSFYTKPLPGIIMGGILPFGCIFIQLFFILNSIWSHQMYYMFGFLFLVFIILVITCSEATILLCYFHLCAEDYHWQWRSFLTRGFTAVYFLSMQYTT

SEQ ID NO: 214 - protein, 207 aa, Homo sapiens
MLDTLVPAHPALVNAIVLVLHSVAGSAPMPGTDSSSRSMPSSSYRDMPGGFLFEGLSDDEDDFHPNTRSTPSSSTPSSRPASLGYSGAAGPRPITQSELATALALASTPESSSHTPTPGTQGHSSGTSPMSSGVQSGTPITNDLFSQALQHALQASGQPSLQSQWQPQLQQLRDMGIQDDELSLRALQATGGDIQAALELIFAGGAP

SEQ ID NO: 215 - protein, 134 aa, Homo sapiens
  SITE (100): Xaa equals any of the naturally occurring L-amino acids
MYRHGISSQRSWPLWTTIFIFLGVAAILGVTIGLLVHFLAVEKTYYYQGDFHISGVTYNDNCENAASQASTNLSKDIETKMLNAFQNSSIYKEYVKSEVXKLLPNANGSNVQLQLKFKFPPAEGVSMRTKIKAK

SEQ ID NO: 216 - protein, 184 aa, Homo sapiens
  SITE (9): Xaa equals any of the naturally occurring L-amino acids
  SITE (50): Xaa equals any of the naturally occurring L-amino acids
  SITE (98): Xaa equals any of the naturally occurring L-amino acids
  SITE (137): Xaa equals any of the naturally occurring L-amino acids
  SITE (163): Xaa equals any of the naturally occurring L-amino acids
MWLCPLALXLILMAASGAACEVKDVCVGSPGIPGTPGSHGLPGRDGRDGXKGDPGPPGPMGPPGETPCPPGNNGLPGAPGVPGERGEKGEAGERGPPXLPAHLDEELQATLHDFRHQILQTRGALSLQGSIMTVGEXVFSSNGQSITFDAIQEACARASGPNXCPKEFKRKMRPLQASERKSTT

SEQ ID NO: 217 - protein, 140 aa, Homo sapiens
  SITE (113): Xaa equals any of the naturally occurring L-amino acids
  SITE (130): Xaa equals any of the naturally occurring L-amino acids
MTMRSLLRTPFLCGLLWAFCAPGARAEEPAASFSQPGSMGLDKNTVHDQEHIMEHLEGVINKPEAEMSPQELQLHYFKMHDYDGNNLLDGLKLSTAITHVHKEEGSEQAPLMXEDELINIIDGVLRDDDXNNDGYIDYAE

SEQ ID NO: 218 - protein, 100 aa, Homo sapiens [sequence omitted]

SEQ ID NO: 219 - protein, 278 aa, Homo sapiens
MWSGWWLWPLVAVCTADFFRDEAERIMRDSPVIDGHNDLPWQLLDMFNNRLQDERANLTTLAGTHTNIPKLRAGFVGGQFWSVYTPCDTQNKDAVRRTLEQMDVVHRMCRMYPETFLYVTSSAGIRQAFREGKVASLIGVEGGHSIDSSLGVLRALYQLGMRYLTLTHSCNTPWADNWLVDTGDSEPQSQGLSPFGQRVVKELNRLGVLIDLAHVSVATMKATLQLSRAPVIFSHSSAYSVCASRRNVPDDVLRLVKQTDSLVMVNFYNNYISCTNIS

SEQ ID NO: 220 - protein, 69 aa, Homo sapiens
  SITE (42): Xaa equals any of the naturally occurring L-amino acids
MLLRKRYRHRPCRLQFLLLLLMLGCVLMMVAMLHPPHHTLHXTVTAQASKHSPEARYRLDFGESQDWVL

SEQ ID NO: 221 - protein, 142 aa, Homo sapiens
MGPPPGAGVSCRGGCGFSRLLAWCFLLALSPQAPGSRGAEAVWTAYLNVSWRVPHTGVNRTVWELSEEGVYGQDSPLEPVAGVLVPPDGPGALNACNPHTNFTVPTVWGSTVQVSWLALIQRGGGCTFADKIHLAYERGASG

SEQ ID NO: 222 - protein, 106 aa, Homo sapiens
  SITE (99): Xaa equals any of the naturally occurring L-amino acids
MIFTFTFPFSLLFCLTCTVATEMHFRNRRFRPAPSAALVPVALDFPGPFPVGGPCRPHQGGVGVTWQKGPRSGDVVPRIWNLSHPSCSWTEFFPFIRRXPLAVSSR

SEQ ID NO: 223 - protein, 99 aa, Homo sapiens
MWLCPLALTLILMAASGAACEVKDVCVGSPGIPGTPGSHGLPGRDGRDGVKGDPGPPGPMGPPGETPCPPGNNGLPGAPGVPGERGEKGEARERGPPGL

SEQ ID NO: 224 - protein, 71 aa, Homo sapiens
MGSHPPLRMAWIHALLFPFGLKALPTSGDGFHRNNSIFHQDGWHQPCWDLDPRGLSLQVWRGQGPRLCCSL

SEQ ID NO: 225 - protein, 137 aa, Homo sapiens
  SITE (132): Xaa equals any of the naturally occurring L-amino acids
  SITE (135): Xaa equals any of the naturally occurring L-amino acids
MQSHTPTLPGLVTVVLLVLMRQGPAGVAWGHTPKVSLCLPTAVGPDRQPVVHGGDDRQLLQHRGSHHGRGHHHSRLLHRRHLLHADPLRLHLMHGRAPGEHGGALHLRHSLHLHPEPHPGDRVRLTGRLLFXCVXEG

SEQ ID NO: 226 - protein, 247 aa, Homo sapiens
MHLARLVGSCSLLLLLGALSGWAASDDPIEKVIEGINRGLSNAEREVGKALDGINSGITHAGREVEKVFNGLSNMGSHTGKELDKGVQGLNHGMDKVAHEINHGIGQAGKEAEKLGHGVNNAAGQAGKEADKAVQGFHTGVHQAGKEAEKLGQGVNHAADQAGKEVEKLGQGAHHAAGQAGKELQNAHNGVNQASKEANQLLNGNHQSGSSSHQGGATTTPLASGASVNTPFINLPALWRSVANIMP

SEQ ID NO: 227 - protein, 120 aa, Homo sapiens; identical to SEQ ID NO: 208

SEQ ID NO: 228 - protein, 97 aa, Homo sapiens
MQLGTGLLLAAVLSLQLAAAEAIWCHQCTGFGGCSHGSRCLRDSTHCVTTATRVLSNTEDLPLVTKMCHIGCPDIPSLGLGPYVSIACCQNNLCNHD

SEQ ID NO: 229 - protein, 140 aa, Homo sapiens
MRPCQVPGAATGPRAMWLCPLALNLILMAASGAVCEVKDVCVGSPGIPGTPGSHGLPGRDGRDGLKGDPGPPGPMGPPGEMPCPPGNDGLPGAPGIPGECGEKGEPGERGPPGLPAHLDEELQATLHDFRHQILQTRGAL

SEQ ID NO: 230 - protein, 161 aa, Homo sapiens
  SITE (125): Xaa equals any of the naturally occurring L-amino acids
  SITE (146): Xaa equals any of the naturally occurring L-amino acids
MANGLAAAGSPVFLCALSPLGQLLQDRYGWRGGFLILGGLLLNCCVCAALMRPLVVTAQPGSGPPRPSRRLLDLSVFRHRGFVLYAVAASVMVLGLFVPPVFVVSYAKDLGVPDTKAAFLLTILXFIDIFARPAAGFVAGLGKVRXYSVYLFSFSMFFNGL

SEQ ID NO: 231 - protein, 155 aa, Homo sapiens [sequence omitted]

SEQ ID NO: 232 - protein, 189 aa, Homo sapiens
MVMLLLLLSALAGLFGAAEGQAFHLGKCPNPPVQENFDVNKYLGRWYEIEKIPTTFENGRCIQANYSLMENGKIKVLNQELRADGTVNQIEGEATPVNLTEPAKLEVKFSWFMPSAPYWILATDYENYALVYSCTCIIQLFHVDFAWILARNPNLPPETVDSLKNILTSNNIDVKKMTVTDQVNCPKLS

SEQ ID NO: 233 - protein, 261 aa, Homo sapiens
MSLSAFTLFLALIGGTSGQYYDYDFPLSIYGQSSPNCAPECNCPESYPSAMYCDELKLKSVPMVPPGIKYLYLRNNQIDHIDEKAFENVTDLQWLILDHNLLENSKIKGRVFSKLKQLKKLHINHNNLTESVGPLPKSLEDLQLTHNKITKLGSFEGLVNLTFIHLQHNRLKEDAVSAAFKGLKSLEYLDLSFNQIARLPSGLPVSLLTLYLDNNKISNIPDEYFKRFNALQYLRLSHNELADSGIPGNSFNVSSLVELDL

SEQ ID NO: 234 - protein, 120 aa, Homo sapiens
  SITE (80): Xaa equals any of the naturally occurring L-amino acids
  SITE (110): Xaa equals any of the naturally occurring L-amino acids
MLATCAEALPRPNWELALYIIISGIMSALFLLVIGTAYLEAQGIWEPFRRRLSFEASNPPFDVGRPFDLRRIVGISSEGXYVHMLAINSLVYIDLADKITIKNKFLFKKXKKKKKKKKKK

SEQ ID NO: 235 - protein, 120 aa, Homo sapiens; identical to SEQ ID NO: 208

SEQ ID NO: 236 - protein, 298 aa, Homo sapiens
MVRMVPVLLSLLLLLGPAVPQENQDGRYSLTYIYTGLSKHVEDVPAFQALGSLNDLQFFRYNSKDRKSQPMGLWRQVEGMEDWKQDSQLQKAREDIFMETLKDIVEYYNDSNGSHVLQGRFGCEIENNRSSGAFWKYYYDGKDYIEFNKEIPAWVPFDPAAQITKQKWEAEPVYVQRAKAYLEEECPATLRKYLKYSKNILDRQDPPSVVVTSHQAPGEKKKLKCLAYDFYPGKIDVHWTRAGEVQEPELRGDVLHNGNGTYQSWVVVAVPPQDTAPYSCHVQHSSLAQPLVVPWEAS

SEQ ID NO: 237 - protein, 364 aa, Homo sapiens [sequence omitted]

SEQ ID NO: 238 - protein, 70 aa, Homo sapiens
MERPSLRALLLGAAGLLLLLLPLSSSSSSDTCGPCEPASCPPLPPLGCLLGETRDACGCCPMCARGEGEP

SEQ ID NO: 239 - protein, 110 aa, Homo sapiens
MFGFLFLVFIILVITCSEATILLCYFHLCAEDYHWQWRSFLTSGFTAVYFLIYAVHYFFSKLQITGTASTILYFGYTMIMVLIFFLFTGTIGFFACFWFVTKIYSVVKVD

SEQ ID NO: 240 - protein, 127 aa, Homo sapiens
MIRTLLLSTLVAGALSCGDPTYPPYVTRVVGGEEARPNSWPWQVSLQYSSNGKWYHTCGGSLIANSWVLTAAHCISSSRTYRVGLGRHNLYVAESGSLAVSVSKIVVHKDWNSNQISKGNDIALLKL

SEQ ID NO: 241 - protein, 61 aa, Homo sapiens
MLIHILLPMVFCVLLIMVMCYLKSQWIKETCYPDIPDPYKSSILSLIKFKVNVEKKKKKKK

SEQ ID NO: 242 - protein, 183 aa, Homo sapiens
MVRMVPVLLSLLLLLGPAVPQENQDGRYSLTYIYTGLSKHVEDVPAFQALGSLNDLQFFRYNSKDRKSQPMGLWRQVEGMEDWKQDSQLQKAREDIFMETLKDIVEYYNDSNGSHVLQGRFGCEIENNRSSGAFWKYYYDGKDYIEFNKEIPAWVPFDPAAPYSCHVQHSSLAQPLVVPWEAS

SEQ ID NO: 243 - protein, 217 aa, Homo sapiens
  SITE (51): Xaa equals any of the naturally occurring L-amino acids
  SITE (106): Xaa equals any of the naturally occurring L-amino acids
  SITE (129): Xaa equals any of the naturally occurring L-amino acids
  SITE (165): Xaa equals any of the naturally occurring L-amino acids
  SITE (199): Xaa equals any of the naturally occurring L-amino acids
MAGLNVSLSFFFATFTLCEAARRASKALLPVGAYEVFAREAVGAVQLGACXLEMRTLVELGPWAGDFGPDLLLTLLFLLFLAHGVTLDGASANPTVSLQEFLMAEXSLPGTLLKLAAQGLGMQAACTLXRLCWAWELSDLHLLQSLMAQSCSSALRTSVPHGALXEAACTFCFHLTLLHLRHSPPAYSGPAVALLVTVXAYTAGPYVCFFNPALAAL

SEQ ID NO: 244 - protein, 288 aa, Homo sapiens
MSRLRALLGLGLLVAGSRLPRIKSQTIACRSGPTWWGPQRLNSGGRWDSEVMASTVVKYLSQEEAQAVDQELFNEYQFSVDQLMELAGLSCATAIAKAYPPTSMSRSPPTVLVICGPGNNGGDGLVCARHLKLFGYEPTIYYPKRPNKPLFTALVTQCQKMDIPFLGEMPAEPMTIDELYELVVDAIFGFSFKGDVREPFHSILSVLKGLTVPIASIDIPSGWDVEKGNAGGIQPDLLISLTAPKKSATQFTGRYHYLGGRFVPPALEKKYQLNLPPYPDTECVYRLQ

SEQ ID NO: 245 - protein, 71 aa, Homo sapiens
MEKILILLLVALSVAYAAPGPRGIIINLTLYGIYYKCPCERGLTCEGDKTIVGSITNTNFGICHDAGRSKQ

SEQ ID NO: 246 - protein, 112 aa, Homo sapiens
MEKILILLLVALSVAYAAPGPRGIIINLENGELCMNSAQCKSNCCQHSSALGLARCTSMASENSECSVKTLYGIYYKCPCERGLTCEGDKTIVGSITNTNFGICHDAGRSKQ

SEQ ID NO: 247 - protein, 180 aa, Homo sapiens
MASTSYDYCRVPMEDGDKRCKLLLGIGILVLLIIVILGVPLIIFTIKANSEACRDGLRAVMECRNVTHLLQQELTEAQKGFQDVEAQAATCNHTVMALMASLDAEKAQGQKKVEELEGEITTLNHKLQDASAEVERLRRENQVLSVRIADKKYYPSSQDSSSAAAPQLLIVLLGLSALLQ

SEQ ID NO: 248 - protein, 154 aa, Homo sapiens
  SITE (74): Xaa equals any of the naturally occurring L-amino acids
  SITE (129): Xaa equals any of the naturally occurring L-amino acids
  SITE (130): Xaa equals any of the naturally occurring L-amino acids
  SITE (134): Xaa equals any of the naturally occurring L-amino acids
  SITE (138): Xaa equals any of the naturally occurring L-amino acids
MAGLNVSLSFFFATFALCEAARRASKALLPVGAYEVFAREAVGAVQLGACFLEMRTLVELGPWAGDFGPDLLLXLLFLLFLAHGVTLDGASANPTVSLQEFLMAEESLPGTLLKLAAQGLGMQAACTLXXLCWXWELXDLHLLQSLMAQSCSSA

SEQ ID NO: 249 - protein, 134 aa, Homo sapiens
MLLVLLSVVLLALSSAQSTDNDVNYEDFTFTIPDVEDSSQRPDQGPQRPPPEGLLPRPPGDSGNQDDGPQQRPPKPGGHHRHPPPPPFQNQQRPPQRGHRQLSLPRFPSVSLQEASSFFRRDRPARHPQEQPLW

SEQ ID NO: 250 - protein, 254 aa, Homo sapiens
  SITE (206): Xaa equals any of the naturally occurring L-amino acids
  SITE (225): Xaa equals any of the naturally occurring L-amino acids
  SITE (226): Xaa equals any of the naturally occurring L-amino acids
  SITE (229): Xaa equals any of the naturally occurring L-amino acids
MRPDPRLKWAVLVLVLVQMLACWLVRGLAWRWLLFWAYAFGGCVNHSLTLAIHDISHNAAFGTGRAARNRWLAVFANLPVGVPYAASFKKYHVDHHRYLGGDGLDVDVPTRLEGWFFCTPARKLLWLVLQPFFYSLRPLCVHPKAVTRMEVLNTLVQLAADLAIFALWGLKPVVYLLASSFLGLGLHPISGHFVAEHYMFLKGHEXYSYYGPLNWITFNVGYTWXXTTXPAIPGYNLAVVRKIGRVLRPLARQS

SEQ ID NO: 251 - protein, 347 aa, Homo sapiens
MRACISLVLAVLCGLAWADLYSAPTSCQGRCYEAFDKHHQCHCNARCQEFGNCCKDFESLCSDHEVSHSSDAITKEEIQSISEKIYRADTNKAQKEDIVLNSQNCISPSETRNQVDRCPKPLFTYVNEKLFSKPTYAAFINLLNNYQRATGHGEHFSAQELAEQDAFLREIMKTAVMKELYSFLHHQNRYGSEQEFVDDLKNMWFGLYSRGNEEGDSSGFEHVFSGEVKKGKVTGFHNWIRFYLEEKEGLVDYYSHIYDGPWDSYPDVLAMQFNWDGYYKEVGSAFIGSSPEFEFALYSLCFIARPGKVCQLSLGGYPLAVRTYTWDKSTYGNGKKYIGTAYIVSST

SEQ ID NO: 252 - protein, 347 aa, Homo sapiens
  SITE (343): Xaa equals any of the naturally occurring L-amino acids
MSSWSRQRPKSPGGIQPHVSRTLFLLLLLAASAWGVTLSPKDCQVFRSDHGSSISCQPPAEIPGYLPADTVHLAVEFFNLTHLPANLLQGASKLQELHLSSNGLESLSPEFLRPVPQLRVLDLTRNALTGLPSGLFQASATLDTLVLKENQLEVLEVSWLHGLKALGHLDLSGNRLRKLPPGLLANFTLLRTLDLGENQLETLPPDLLRGPLQLERLHLEGNKLQVLGKDLLLPQPDLRYLFLNGNKLARVAAGAFQGLRQLDMLDLSNNSLASVPEGLWASLGQPNWDMRDGFDISGNPWICDQNLSDLYRWLQAQKDKMFSQNDTRCAGPEAVKGQTLLAXAKSQ

SEQ ID NO: 253 - protein, 170 aa, Homo sapiens
MMAGMKIQLVCMLLLAFSSWSLCSDSEEEMKALEADFLTNMHTSKISKAHVPSWKMTLLNVCSLVNNLNSPAEETGEVHEEELVARRKLPTALDGFSLEAMLTIYQLHKICHSRAFQHWELIQEDILDTGNDKNGKEEVIKRKIPYILKRQLYENKPRRPYILKRDSYYY

SEQ ID NO: 254 - protein, 291 aa, Homo sapiens
  SITE (267): Xaa equals any of the naturally occurring L-amino acids
  SITE (269): Xaa equals any of the naturally occurring L-amino acids
  SITE (280): Xaa equals any of the naturally occurring L-amino acids
MRPAFALCLLWQALWPGPGGGEHPTADRAGCSASGACYSLHHATMKRQAAEEACILRGGALSTVRAGAELRAVLALLRAGPGPGGGSKDLLFWVALERRRSHCTLENEPLRGFSWLSSDPGGLESDTLQWVEEPQRSCTARRCAVLQATGGVEPAGWKEMRCHLRANGYLCKYQFEVLCPAPRPGAASNLSYRAPFQLHSAALDFSPPGTEVSALCRGQLPISVTCIADEIGARWDKLSGDVLCPCPGRYLRAGKCAELPNCLDDLXGXACECATGFELXKDGRSCVTSGE

SEQ ID NO: 255 - protein, 97 aa, Homo sapiens
MQLGTGLLLAAVLSLQLAAAEAIWCHQCTGFGGCSHGSRCLRDSTHCVTTATRVLSNTEDLPLVTKMCHIGCPDIPSLGLGPYVSIACCQTSLCNHD

SEQ ID NO: 256 - protein, 338 aa, Homo sapiens
MSLSAFTLFLALIGGTSGQYYDYDFPLSIYGQSSPNCAPECNCPESYPSAMYCDELKLKSVPMVPPGIKYLYLRNNQIDHIDEKAFENVTDLQWLILDHNLLENSKIKGRVFSKLKQLKKLHINHNNLTESVGPLPKSLEDLQLTHNKITKLGSFEGLVNLTFIHLQHNRLKEDAVSAAFKGLKSLEYLDLSFNQIARLPSGLPVSLLTLYLDNNKISNIPDEYFKRFNAFQYLRLSHNELADSGIPGNSFNVSSLVELDLSYNKLKNIPTVNENLENYYLEVNQLEKFDIKSFCKILGPLSYSKIKHLRLDGNRISETSLPPDMYECLRVANEVTLN

SEQ ID NO: 257 - protein, 209 aa, Homo sapiens
  SITE (205): Xaa equals any of the naturally occurring L-amino acids
MHLARLVGSCSLLLLLGALSGWAASDDPIEKVIEGINRGLSNAEREVGKALDGINSGITHAGREVEKVFNGLSNMGSHTGKELDKGVQGLNHGMDKVAHEINHGIGQAGKEAEKLGHGVNNVAGQAGKEADKAVQGFHTGVHQAGKEAEKLGQGVNHAADQAGKEVEKLGQGAHHAAGQAGKELQNAHNGVNQASKEANQLLNGXHQSG

SEQ ID NO: 258 - protein, 313 aa, Homo sapiens
  SITE (295): Xaa equals any of the naturally occurring L-amino acids
  SITE (301): Xaa equals any of the naturally occurring L-amino acids
  SITE (302): Xaa equals any of the naturally occurring L-amino acids
  SITE (313): Xaa equals any of the naturally occurring L-amino acids
MRACISLVLAVLCGLAWAEDHKESEPLPQLEEETEEALASNLYSAPTSCQGRCYEAFDKHHQCHCNARCQEFGNCCKDFESLCSDHEVSHSSDAITKEEIQSISEKIYRADTNKAQKEDIVLNSQNCISPSETRNQVDRCPKPLFTYVNEKLFSKPTYAAFINLLNNYQRATGHGEHFSAQELAEQDAFLREIMKTAVMKELYSFLHHQNRYGSEQEFVDDLKNMWFGLYSRGNEEGDSSGFEHVFSGEVKKGKVTGFHNWIRFYLEEKEGLVDYYSHIYDGPWDSYPDVLAMQXNWDGYXXGSGLCFHRQQX

SEQ ID NO: 259 - protein, 278 aa, Homo sapiens; identical to SEQ ID NO: 219

SEQ ID NO: 260 - protein, 104 aa, Homo sapiens
MKLAALLGLCVALSCSSAAAFLVGSAKPVAQPVAALESAAEAGAGTLANPLGTLNPLKLLLSSLGIPVNHLIEGSQKCVAELGPQAVGAVKALKALLGALTVFG

SEQ ID NO: 261 - protein, 208 aa, Homo sapiens
MGLGARGAWAALLLGTLQVLALLGAAHESAAMAASANIENSGLPHNSSANSTETLQHVPSDHTNETSNSTVKPPTSVASDSSNTTVTTMKPTAASNTTTPGMVSTNMTSTTLKSTPKTTSVSQNTSQISTSTMTVTHNSSVTSAASSVTITTTMHSEAKKGSKFDTGSFVGGIVLTLGVLSILYIGCKMYYSRRGIRYRTIDEHDAII

SEQ ID NO: 262 - protein, 240 aa, Homo sapiens
MLALLCSCLLLAAGASDAWTGEDSAEPNSDSAEWIRDMYAKVTEIWQEVMQRRDDDGTLHAACQVQPSATLDAAQPRVTGVVLFRQLAPRAKLDAFFALEGFPTEPNSSSRAIHVHQFGDLSQGCESTGPHYNPLAVPHPQHPGDFGNFAVRDGSLWRYRAGLAASLAGPHSIVGRAVVVHAGEDDLGRGGNQASVENGNAGRRLACCVVGVCGPGLWERQAREHSERKKRRRESECKAA

SEQ ID NO: 263 - protein, 119 aa, Homo sapiens
MKVLISSLLLLLPLMLMSMVSSSLNPGVARGHRDRGQASRRWLQEGGQECECKDWFLRAPRRKFMTVSGLPKKQCPCDHFKGNVKKTRHQRHHRKPNKHSRACQQFLKQCQLRSFALPL

SEQ ID NO: 264 - protein, 134 aa, Homo sapiens; identical to SEQ ID NO: 249

SEQ ID NO: 265 - protein, 97 aa, Homo sapiens; identical to SEQ ID NO: 255

SEQ ID NO: 266 - protein, 186 aa, Homo sapiens
  SITE (163): Xaa equals any of the naturally occurring L-amino acids
MKFQGPLACLLLALCLGSGEAGPLQSGEESTGTNIGEALGHGLGDALSEGVGKAIGKEAGGAAGSKVSEALGQGTREAVGTGVRQVPGFGVADALGNRVGEAAHALGNTGHEIGRQAEDVIRHGADAVRGSWQGVPGHNGAWETSGGHGIFGSQGGLGGQGQXNPGGLGDSVGSTDTPETQQAALE

SEQ ID NO: 267 - protein, 97 aa, Homo sapiens; identical to SEQ ID NO: 255

SEQ ID NO: 268 - protein, 77 aa, Homo sapiens
  SITE (53): Xaa equals any of the naturally occurring L-amino acids
MLSRLLPPPFFFFLYFILRLMSPCQGKLLSSLYPMSPFSEYILNSNTSSSLYXHLATNFLSFLAWIIAIISKLDCLL

SEQ ID NO: 269 - protein, 180 aa, Homo sapiens; identical to SEQ ID NO: 247

SEQ ID NO: 270 - protein, 263 aa, Homo sapiens
MLGASLPLEMAPWFALLFAASDLLFIFCFLPETLPLEKRAPSIALGFRDAADLLSPLALLRFSAVARGQDPPSGDRLSSLRRLGLVYFLYLFLFSGLEYTLSFLTHQRFQFSSLQQGKMFFLIGLTMATIQGAYARRIHPGGEVAAVKRALLLLVPAFLLIGWGRSLPVLGLGLLLYSFAAAVVVPCLSSVVAGYGSPGQKGTVMGTLRSLGALARAAGPLVAASVYWLAGAQACFTTWSGLFLLPFFLLQKLSYPAQTLKAE

SEQ ID NO: 271 - protein, 149 aa, Homo sapiens
MNYLFFFLTTSGLYCLSGSHGSNVKYIVLTYFNCSWSLTSPGFRDVLKGSQLWQVTDSWEMERTKEYSSCLTFLPTADIVQARVMEELNLLASQAAPIPTSQCTAPPHLFSPLSLTSPFIMSHKSGTVGSHYNLLCHRDSIFLISNHVS

SEQ ID NO: 272 - protein, 110 aa, Homo sapiens
MAAPRLGALPLCLLLPPRPLLGAVSLSPLARPFPPQPPLPCLSRCRANCWSLLRCCTLSLTISSCPPPPPLPRLTPSRADLRRSGRRRGGGTVSVGPERPAGPPGRRTGR

SEQ ID NO: 273 - protein, 97 aa, Homo sapiens; identical to SEQ ID NO: 255

SEQ ID NO: 274 - protein, 169 aa, Homo sapiens
MHLARLVGSCSLLLLLGALSGWAASDDPIEKVIEGINRGLSNAEREVGKALDGINSGITHAGREVEKVFNGLSNMGSHTGKELDKGVQGLNHGMDKVAHEINHGIGQAGKEAEKLGHGVNNAAGQGNHQSGSSSHQGGATTTPLASGASVNTPFINLPALWRSVANIMP

SEQ ID NO: 275 - protein, 189 aa, Homo sapiens; identical to SEQ ID NO: 232

SEQ ID NO: 276 - protein, 180 aa, Homo sapiens; identical to SEQ ID NO: 247

SEQ ID NO: 277 - protein, 180 aa, Homo sapiens; identical to SEQ ID NO: 247

SEQ ID NO: 278 - protein, 354 aa, Homo sapiens
MKSLLLLVLISICWADHLSDNYTLDHDRAIHIQAENGPHLLVEAEQAKVFSHRGGNVTLPCKFYRDPTAFGSGIHKIRIKWTKLTSDYLKEVDVFVSMGYHKKTYGGYQGRVFLKGGSDSDASLVITDLTLEDYGRYKCEVIEGLEDDTVVVALDLQGVVFPYFPRLGRYNLNFHEAQQACLDQDAVIASFDQLYDAWRGGLDWCNAGWLSDGSVQYPITKPREPCGGQNTVPGVRNYGFWDKDKSRYDVFCFTSNFNGRFYYLIHPTKLTYDEAVQACLNDGAQIAKVGQIFAAWKILGYDRCDAGWLADGSVRYPISRPRRRCSPTEAAVRFVGFPDKKHKLYGVYCFRAYN

SEQ ID NO: 279 - protein, 95 aa, Homo sapiens
MMDTEVLSLLSSVALPSLLLASESFDSIYPGIFCVLMFSSGLASAVLIGRALSFQAILKGGQSKGQSLNPFCGLNNLRIKSSVLLIPVLLCQTLS

SEQ ID NO: 280 - protein, 245 aa, Homo sapiens
MDVGPSSLPHLGLKLLLLLLLLPLRGQANTGCYGIPGMPGLPGAPGKDGYDGLPGPKGEPGIPAIPGIRGPKGQKGEPGLPGHPGKNGPMGPPGMPGVPGPMGIPGEPGEEGRYKQKFQSVFTVTRQTHQPPAPNSLIRFNAVLTNPQGDYETSTGKFTCKVPGLYYFVYHASHTANLCVLLYRSGVKVVTFCGHTSKTNQVNSGGVLLRLQVGEEVWLAVNDYYDMVGIQGSDSVFSGFLLFPD

SEQ ID NO: 281 - protein, 383 aa, Homo sapiens
  SITE (333): Xaa equals any of the naturally occurring L-amino acids
MAGPWTFTLLCGLLAATLIQATLSPTAVLILGPKVIKEKLTQELKDHNATSILQQLPLLSAMREKPAGGIPVLGSLVNTVLKHVIWLKVITANILQLQVKPSANDQELLVKIPLDMVAGFNTPLVKTIVEFHMTTEAQATIRMDTSASGPTRLVLSDCATSHGSLRIQLLHKLSFLVNALAKQVMNLLVPSLPNLVKNQLCPVIEASFNGMYADLLQLVKVPISLSIDRLEFDLLYPAIKGDTIQLYLGAKLLDSQGKVTKWFNNSAASLTMPTLDNIPFSLIVSQDVVKAAVAAVLSPEEFMVLLDSVLPESAHRLKSSIGLINEKAADKLXSTQIVKILTQDTPEFFIDQGHAKVAQLIVLEVFPSSEALRPLFTLGIEAS

SEQ ID NO: 282 - protein, 328 aa, Homo sapiens
MRACISLVLAVLCGLAWAGKIESCASRCNEKFNRDAACQCDRRCLWHGNCCEDYEHLCTEDHKESEPLPQLEEETEEALASNLYSAPTSCQGRCYEAFDKHHQCHCNARCQEFGNCCKDFESLCSDHEVSHSSDAITKEEIQSISEKIYRADTNKAQKEDIVLNSQNCISPSETRNQVDRCPKPLFTYVNEKLFSKPTYAAFINLLNNYQRATGHGEHFSAQELAEQDAFLREIMKTAVMKELYSFLHHQNRYGSEQEFVDDLKNMWFGLYSRGNEEGDSSGFEHVFSGEVKKGKVTGFHNWIRFYLEEKEGLVDYYSHIYDGPWDSY

SEQ ID NO: 283 - protein, 199 aa, Homo sapiens
MASTSYDYCRVPMEDGDKRCKLLLGIGILVLLIIVILGVPLIIFTIKANSEACRDGLRAVMECRNVTHLLQQELTEAQKGFQDVEAQAATCNHTVMALMASLDAEKAQGQKKVEELEGEITTLNHKLQDASAEVERLRRENQVLSVRIADKKYYPSSQDSSSAAAPQLLICAAGPQRSAAVRSQEAGTSWKVRPARLFA

SEQ ID NO: 284 - protein, 119 aa, Homo sapiens; identical to SEQ ID NO: 263

SEQ ID NO: 285 - protein, 90 aa, Homo sapiens
MSPSMWVSLSVLLSLAGSRAFDLLIHLLLFQQALHLSSKESMHQSWRPLEVTPVTIFQLLLEMSLWFLQALTWVTMENVTWEVKKQQEVF

SEQ ID NO: 286 - protein, 138 aa, Homo sapiens
MGGILPFGCIFIQLFFILNSIWSHQMYYMFGFLFLVFIILVITCSEATILLCYFHLCAEDYHWQWRSFLTSGFTAVYFLIYAVHYFFSKLQITGTASTILYFGYTMIMVLIFFLFTGTIGFFACFWFVTKIYSVVKVD

SEQ ID NO: 287 - protein, 153 aa, Homo sapiens
  SITE (103): Xaa equals any of the naturally occurring L-amino acids
MGAPLLSPGWGAGAAGRRWWMLLAPLLPALLLVRPAGALVEGLYCGTRDCYEVLGVSRSAGKAEIARAYRQLARRYHPDRYRPQPGDEGPGRTPQSAEEAFLXVATAYERIKVSQAAAELQQYCMQNACKDALLVGVPAGSNPFREPRSCALL

SEQ ID NO: 288 - protein, 154 aa, Homo sapiens; identical to SEQ ID NO: 248
  SITE (74): Xaa equals any of the naturally occurring L-amino acids
  SITE (129): Xaa equals any of the naturally occurring L-amino acids
  SITE (130): Xaa equals any of the naturally occurring L-amino acids
  SITE (134): Xaa equals any of the naturally occurring L-amino acids
  SITE (138): Xaa equals any of the naturally occurring L-amino acids

SEQ ID NO: 289 - protein, 97 aa, Homo sapiens; identical to SEQ ID NO: 255

SEQ ID NO: 290 - protein, 119 aa, Homo sapiens; identical to SEQ ID NO: 263

SEQ ID NO: 291 - protein, 356 aa, Homo sapiens
MAAEGWIWRWGWGRRCLGRPGLLGPGPGPTTPLFLLLLLGSVTADITDGNSEHLKREHSLIKPYQGVGSSSMPLWDFQGSTMLTSQYVRLTPDERSKEGSIWNHQPCFLKDWEMHVHFKVHGTGKKNLHGDGIALWYTRDRLVPGPVFGSKDNFHGLAIFLDTYPNDETTERVFPYISVMVNNGSLSYDHSKDGRWTELAGCTADFRNRDHDTFLAVRYSRGRLTVMTDLEDKNEWKNCIDITGVRLPTGYYFGASAGTGDLSDNHDIISMKLFQLMVEHTPDEESIDWTKIEPSVNFLKSPKDNVDDPTGNFRSGPLTGWRVFLLLLCALLGIVVCAVVGAVVFQKRQERNKRFY

SEQ ID NO: 292 - protein, 87 aa, Homo sapiens
MTQQIKAGRLILVRWLTLAVSWNLTWGCLPEHLHMACPWSYLTSSLQWLGSKSSYPKRTRQKCMTFRILSHKSHRVTSTIPCWSRRT

SEQ ID NO: 293 - protein, 288 aa, Homo sapiens; identical to SEQ ID NO: 244

SEQ ID NO: 294 - protein, 204 aa, Homo sapiens [sequence omitted]

SEQ ID NO: 295 - protein, 158 aa, Homo sapiens
MAMSSGCLQLFLLLGLETQRSACLLDISPRHPVEGSYSFPPTAPRPSPPLSSQFCKGASPATYSPTGPSHKWCLWALSFLTMSSPIEVLSSYRTGPHPSPGRLPPHLPPILGEARATLKSHPSLLGLLAKIRCKSHTHLCPLSTRDEPRRTGRAGDKS

SEQ ID NO: 296 - protein, 229 aa, Homo sapiens
MDILVPLLQLLVLLLTLPLHLMALLGCWQPLCKSYFPYLMAVLTPKSNRKMESKKRELFSQIKGLTGASGKVALLELGCGTGANFQFYPPGCRVTCLDPNPHFEKFLTKSMAENRHLQYERFVVAPGEDMRQLADGSMDVVVCTLVLCSVQSPRKVLQEVRRVLRPGGVLFFWEHVAEPYGSWAFMWQQVFEPTWNTLGMAAASPERPGRILRTASSPEIQWNDSPLPW

SEQ ID NO: 297 - protein, 62 aa, Homo sapiens
MHIFKHAQPALLYLVPACIGFPVLVALAKGEVTEMFSYEESNPKDPAAVTESKEGTEASASK

SEQ ID NO: 298 - protein, 177 aa, Homo sapiens
MNFTWKTYNPAFSRLEIWFRFFFVVLTFIVTCLFAHSLRKFSMRDWGIEQKWMSVLLPLLLLYNDPFFPLSFLVNSWLPGMLDDLFQSMFLCALLLFWLCVYHGIRVQGERKCLTFYLPKFFIVGLLWLASVTLGIWQTVNELHDPMYQYRVDTGNFQGMKVFLWWWQRCTFCTSCS

SEQ ID NO: 299 - protein, 125 aa, Homo sapiens
MERPSLRALLLGAAGLLLLLLPLSSSSSSDTCGPCEPASCPPLPPLGCLLGETRDACGCCPMCARGEGEPCGGGGAGGGYCAPGMECVKSRKRRRGKAGAAAGGPGVSGVCVSKNHYPGSGSDLT

SEQ ID NO: 300 - protein, 180 aa, Homo sapiens; identical to SEQ ID NO: 247

SEQ ID NO: 301 - protein, 100 aa, Homo sapiens
MPRSPRWDSSLPPGSSMAWTAATLAGWQMVASATLWFTRILTVGPQSLGSEALASPTRRAACTVFTATASTRTWGPPLPHSLTGCVFIEWFVFPCGLEPF

SEQ ID NO: 302 - protein, 137 aa, Homo sapiens
  SITE (131): Xaa equals any of the naturally occurring L-amino acids
MERPSLRALLLGAAGLLLLLLPLSSSSSSDTCGPCEPASCPPLPPLGCLLGETRDACGCCPMCARGEGEPCGGGGAGRGYCAPGMECVKSRKRRRGKAGAAAGGPGVSGVCVCKSRYPVCGSDGTTYPSGXQLRAAS

SEQ ID NO: 303 - protein, 70 aa, Homo sapiens
MNVYFFVSFFLVFALCSLSKVCLTHFHVSLANFFRVCLCLIFSFCSQEWSVSCLRHISHFSFCCYFSLLS

SEQ ID NO: 304 - protein, 145 aa, Homo sapiens [sequence omitted]

SEQ ID NO: 305 - protein, 112 aa, Homo sapiens
  SITE (10): Xaa equals any of the naturally occurring L-amino acids
MAHLLLCSPXQLYLLFLSLTLATVNARWLEPRTTAAMWALQTVEKERGLGGEVPGSHQGPDPYRQLREKDPKYSALRQNFFRYHGLSSLCNLGCVLSNGLCLAGLALEIRSL

SEQ ID NO: 306 - protein, 99 aa, Homo sapiens
MKIPVLPAVVLLSLLVLHSAQGATLGGPEEESTIENYASRPEAFNTPFLNIDKLRSAFKADEFLNWHALFESIKRKLPFLNWDAFPKLKGLRSATPDAQ

SEQ ID NO: 307 - protein, 318 aa, Homo sapiens
  SITE (252): Xaa equals any of the naturally occurring L-amino acids
  SITE (306): Xaa equals any of the naturally occurring L-amino acids
  SITE (309): Xaa equals any of the naturally occurring L-amino acids
  SITE (315): Xaa equals any of the naturally occurring L-amino acids
MHLARLVGSCSLLLLLGALSGWAASDDPIEKVIEGINRGLSNAEREVGKALDGINSGITHAGREVEKVFNGLSNMGSHTGKELDKGVQGLNHGMDKVAHEINHGIGQAGKEAEKLGHGVNNAAGQVGKEADKLIHHGVHHGANQAGSEAGKFGQGVDNAAGQAGNEAGRFGQGVHHAAGQAGNEAGRFGQGVHHAAGQAGNEAGRFGQGAHHGLSEGWKETEKFGQGIHHAAGQVGKEAEKFGQGPTMLRGXPEMKAGDLARGPPWSHEGWKETESLARGPPYCWSVWKEAKSLARGPPCCGQPEXAGXWPGAHXLGQ

SEQ ID NO: 308 - protein, 84 aa, Homo sapiens
MAVTYSRLFPPAFRRLFEFFVLLKALFVLFVLAYIHIVFSRSPINCLEHVRDKWPREGILRVEVRHNSSRAPVFLQFCDSGGRF

SEQ ID NO: 309 - protein, 86 aa, Homo sapiens
MEWEGGAIRHPSTELGIMGSWFYLFLAPLFKGLAGSLPFGCLSLLQPTEKTALQRWRVFMKHSCQEPRHRAGGLEKGGHTGGGRSW

SEQ ID NO: 310 - protein, 134 aa, Homo sapiens
MWMELLSHGLFLLLKHIQLLLVGWTKGWWLYTEPGACWPAGCVSHPVLEALDFSAVQASPAAPWCRGQSRAVPPPASQQSSSRFREIPAVSSLRKEAHCVLRLNFLTHFIFMCPYQNISSVSNSGRLLVATGQS

SEQ ID NO: 311 - protein, 62 aa, Homo sapiens
MHRSWTWWLMPLISATWEAAAGGLLEVRRSRPAWAFWPVSAFNIPSSLSLIISHFRFIIRDV

SEQ ID NO: 312 - protein, 259 aa, Homo sapiens
  SITE (239): Xaa equals any of the naturally occurring L-amino acids
MPSRLMMEHVLLVSILHHTVGIEVGAHFLEAVVRKFDAIYKYGSEGKECDNLFTVIAHLYNFHVVQSLLIFDILKKLIGTFTEKDIELILLMLKNVGFSLRKDDALSLKELITEAQTKASGAGSEFQDQTRIRFMLETMLALKNNDMRKIPGYDPEPVEKLRKLQRALVRNAGSGSETQLRVSWDSVLSAEQTGRWWIVGSAWSGAPMIDNSHHTHLQKQLVGTVGTPMLKAARQRHPXVWCVVLALPGAALLLFLNGH

SEQ ID NO: 313 - protein, 85 aa, Homo sapiens
MKIPVLPAVVLLSLLVLHSAQGATLGGPEEESTIENYASRPEAFKADEFLNWHALFESIKRKLPFLNWDAFPKLKGLRSATPDAQ

SEQ ID NO: 314 - protein, 189 aa, Homo sapiens [sequence omitted]

SEQ ID NO: 315 - protein, 60 aa, Homo sapiens
MWLYLVFPLLLPQLYYHANAVFFFGGDKDFLSFVLKLKLKYLYCIKYNMHTVLSVALHTI

SEQ ID NO: 316 - protein, 114 aa, Homo sapiens
MVVFAFATITPLMFTGYGLLFLSLVITPVIRAKLSKLVRETEQGALFSAVACVNSLAMLTASGIFNSLYPATLNFMKGFPFLLGAGLLLIPAVLIGMLEKADPHLEFQQFPQSP

SEQ ID NO: 317 - protein, 625 aa, Homo sapiens
MLNMWKVRELVDKATNVVMNYSEIESKVREATNDDPWGPSGQLMGEIAKATFMYEQFPELMNMLWSRMLKDNKKNWRRVYKSLLLLAYLIRNGSERVVTSAREHIYDLRSLENYHFVDEHGKDQGINIRQKVKELVEFAQDDDRLREERKKAKKNKDKYVGVSSDSVGGFRYSERYDPEPKSKWDEEWDKNKSAFPFSDKLGELSDKIGSTIDDTISKFRRKDREDSPERCSDSDEEKKARRGRSPKGEFKDEEETVTTKHIHITQATETTTTRHKRTANPSKTIDLGAAAHYTGDKASPDQNASTHTPQSSVKTSVPSSKSSGDLVDLFDGTSQSTGGSADLFGGFADFGSAAASGSFPSQVTATSGNGDFGDWSAFNQAPSGPVASSGEFFGSASQPAVELVSGSQSALGPPPAASNSSDLFDLMGSSQATMTSSQSMNFSMMSTNTVGLGLPMSRSQNTDMVQKSVSKTLPSTWSDPSVNISLDNLLPGMQPSKPQQPSLNTMIQQQNMQQPMNVMTQSFGAVNLSSPSNMLPVRPQTNALIGGPMPMSMPNVMTGTMGMAPLGNTPMMNQSMMGMNMNIGMSAAGMGLTGTMGMGMPNIAMTSGTVQPKQDAFANFANFSK

SEQ ID NO: 318 - protein, 68 aa, Homo sapiens
MLEMNMAIAFPAAPLLTVILALVGMEAIMSEFFNDTTTAFYIILIVWLADQYDAICCHTSTSKRHWLR

SEQ ID NO: 319 - protein, 85 aa, Homo sapiens
MVTGAAPVSATVLTFLRAALGCQFYEGYGQTECTAGCCLTMPGDWTAGHVGAPMPCNLIKLVDVEEMNYMAAEGEGEVCVKGPNV

SEQ ID NO: 320 - protein, 254 aa, Homo sapiens
  SITE (91): Xaa equals any of the naturally occurring L-amino acids
MGGLIILFLIAIIWFPLLFMSLVRSVVGVVNQPIDVTVTLKLGGYEPLFTMSAQQPSIIPFTAQAYEELSRQFDPQPLAMQFISQYSPEDXVTAQIEGSSGALWRISPPSRAQMKRELYNGTADITLRFTWNFQRDLAKGGTVEYANEKHMLALAPNSTARRQLASLLEGTSDQSVVIPNLFPKYIRAPNGPEANPVKQLQPNEEADYLGVRIQLRREQGAGAHGFLEWWVIELQECRTDLQLLPMVIFSDKVS

SEQ ID NO: 321 - protein, 134 aa, Homo sapiens; identical to SEQ ID NO: 249

SEQ ID NO: 322 - protein, 219 aa, Homo sapiens
MAVLRPLQPPGSIRLALLLTWAGPLLFASLPALGWNHWTPGANCSSQAIFPAPYLYLEVYGLLLPAVGAAAFLSVRVLATAHRQLQDICRLERAVCRDEPSALARALTWRQARAQAGAMLLFGLCWGPYVATLLLSVLAYEQRPPLGPGTLLSLLSLGSASAAAVPVAMGLGDQRYTAPWRAAAQRCLQGLWGRASRDSPGPSIAYHPSSQSSVDLDLN

SEQ ID NO: 323 - protein, 112 aa, Homo sapiens
MRRMWALPRWVRMCGGFAGSQLSELFLLVFLIPFTFCDPAETRKTRCMVATAMITMGTVCGWSFLEAAVEQAEAAAGVEVAELPEVAMAPHPGGLKTEWLSLDCLQVEVGRI

SEQ ID NO: 324 - protein, 145 aa, Homo sapiens
  SITE (117): Xaa equals any of the naturally occurring L-amino acids
  SITE (126): Xaa equals any of the naturally occurring L-amino acids
  SITE (128): Xaa equals any of the naturally occurring L-amino acids
  SITE (133): Xaa equals any of the naturally occurring L-amino acids
MLTLLGLSFILAGLIVGGACIYKYFMPKSTIYRGEMCFFDSEDPANSLRGGEPNFLPVTEEADIREDDNIAIIDVPVPSFSDSDPAAIIHDFEKGMTAYLDLLLGNCYLMPLNTSIXMPPKNLVEXLXAVEGXRDGSKPCILIYH

SEQ ID NO: 325 - protein, 97 aa, Homo sapiens; identical to SEQ ID NO: 255

SEQ ID NO: 326 - protein, 160 aa, Homo sapiens
  SITE (94): Xaa equals any of the naturally occurring L-amino acids
MFCPLKLILLPVLLDYSLGLNDLNVSPPELTVHVGDSALMGCVFQSTEDKCIFKIDWTLSPGEHAKDEYVLYYYSNLSVPIGRFQNRVHLMGDXLCNDGSLLLQDVQEADQGTYICEIRLKGESQVFKKAVVLHVLPEEPKGGDCISLLPQTQDVCGVLP

SEQ ID NO: 327 - protein, 220 aa, Homo sapiens
MAGLSRGSARALLAALLASTLLALLVSPARGRGGRDHGDWDEASRLPPLPPREDAARVARFVTHVSDWGALATISTLEAVRGRPFADVLSLSDGPPGAGSGVPYFYLSPLQLSVSNLQENPYATLTMTLAQTNFCKKHGFDPQSPLCVHIMLSGTVTKVNETEMDIAKHSLFIRHPEMKTWPSSHNWFFAKLNITNIWVLDYFGGPKIVTPEEYYNVTVQ

SEQ ID NO: 328 - protein, 130 aa, Homo sapiens
METLGALLVLEFLLLSPVEAQQATEHRLKPWLVGLAAVVGFLFIVYLVLLANRLWCSKARAEDEEETTFRMESNLYQDQSEDKREKKEAKEKEEKRKKEKKTAKEGESNLGLDLEEKEPGDHERAKSTVM

SEQ ID NO: 329 - protein, 576 aa, Homo sapiens
  SITE (123): Xaa equals any of the naturally occurring L-amino acids
  SITE (136): Xaa equals any of the naturally occurring L-amino acids
  SITE (282): Xaa equals any of the naturally occurring L-amino acids
  SITE (309): Xaa equals any of the naturally occurring L-amino acids
  SITE (360): Xaa equals any of the naturally occurring L-amino acids
MGCLWGLALPLFFFCWEVGVSGSSAGPSTRRADTAMTTDDTEVPAMTLAPGHAALETQTLSAETSSRASTPAGPIPEAETRGAKRISPARETRSFTKTSPNFMVLIATSVETSAASGSPEGAXMTTVQTITGSDPXEAIFDTLCTDDSSEEAKTLTMDILTLAHTSTEAKGLSSESSASSDGPHPVITPSRASESSASSDGPHPVITPSRASESSASSDGPHPVITPSRASESSASSDGPHPVITPSRASESSASSDGPHPVITPSWSPGSDVTLLAEALVXVTNIEVINCSITEIETTTSSIPGASDXDLIPTEGVKASSTSDPPALPDSTEAKPHITEVTASAETLSTAGTTESAAPXATVGTPLPTNSATEREVTAPGATTLSGALVTVSRNPLEETSALSVETPSYVKVSGAAPVSIEAGSAVGKTTSFAGSSASSYSPSEAALKNFTPSETPTMDIATKGPFPTSRDPLPSVPPTTTNSSRGTNSTLAKITTSAKTTMKPPTATPTTARTRPTTDVSAGENGGFLLLRLSVASPEDLTDPRVAERLMQQLHRELHAHAPHFQVSLLRVRRG

SEQ ID NO: 330 - protein, 89 aa, Homo sapiens
  SITE (5): Xaa equals any of the naturally occurring L-amino acids
MERVXLALLLLAGLTALEANDPFANKDDPFYYDWKNLQLSGLICGGLLAIAGIAAVLSGKCKCKSSQKQHSPVPEKAIPLITPGSATTC

SEQ ID NO: 331 - protein, 490 aa, Homo sapiens
MRPAFALCLLWQALWPGPGGGEHPTADRAGCSASGACYSLHHATMKRQAAEEACILRGGALSTVRAGAELRAVLALLRAGPGPGGGSKDLLFWVALERRRSHCTLENEPLRGFSWLSSDPGGLESDTLQWVEEPQRSCTARRCAVLQATGGVEPAGWKEMRCHLRANGYLCKYQFEVLCPAPRPGAASNLSYRAPFQLHSAALDFSPPGTEVSALCRGQLPISVTCIADEIGARWDKLSGDVLCPCPGRYLRAGKCAELPNCLDDLGGFACECATGFELGKDGRSCVTSGEGQPTLGGTGVPTRRPPATATSPVPQRTWPIRVDEKLGETPLVPEQDNSVTSIPEIPRWGSQSTMSTLQMSLQAESKATITPSGSVISKFNSTTSSATPQAFDSSSAVVFIFVSTAVVVLVILTMTVLGLVKLCFHESPSSQPRKESMGPPGLESDPEPAALGSSSAHCTNNGVKVGDCDLRDRAEGALLAESPLGSSDA

SEQ ID NO: 332 - protein, 151 aa, Homo sapiens [sequence omitted]

SEQ ID NO: 333 - protein, 341 aa, Homo sapiens
  SITE (255): Xaa equals any of the naturally occurring L-amino acids
  SITE (328): Xaa equals any of the naturally occurring L-amino acids
MWAQLLLGMLALSPAIAEELPNYLVTLPARLNFPSVQKVCLDLSPGYSDVKFTVTLETKDKTQKLLEYSGLKKRHLHCISFLVPPPAGGTEEVATIRVSGVGNNISFEEKKKVLIQRQGNGTFVQTDKPLYTPGQQVYFRIVTMDSNFVPVNDKYSMVELQDPNSNRIAQWLEVVPEQGIVDLSFQLAPEAMLGTYTVAVAEGKTFGTFSVEEYVLPKFKVEVVEPKELSTVQESFLVKICCRYTYGKPMLGAVXVSVCQKANTYWYREVEREQLPDKCRNLSGQTDKTGCFSAPVDMATFDLIGYAYSHQINIVATVVEEGTGVEAXATQNIYISPKWDQ

SEQ ID NO: 334 - protein, 310 aa, Homo sapiens
  SITE (212): Xaa equals any of the naturally occurring L-amino acids
  SITE (220): Xaa equals any of the naturally occurring L-amino acids
  SITE (265): Xaa equals any of the naturally occurring L-amino acids
  SITE (276): Xaa equals any of the naturally occurring L-amino acids
  SITE (284): Xaa equals any of the naturally occurring L-amino acids
  SITE (302): Xaa equals any of the naturally occurring L-amino acids
MMGSPVSHLLAGFCVWVVLGWVGGSVPNLGPAEQEQNHYLAQLFGLYGENGTLTAGGLARLLHSLGLGRVQGLRLGQHGPLTGRAASPAADNSTHRPQNPELSVDVWAGMPLGPSGWGDLEESKAPHLPRGPAPSGLDLLHRLLLLDHSLADHLNEDCLNGSQLLVNFGLSPAAPLTPRQFALLCPALLYQIDSRVCIGAPAPAPPGDLLSXLLQSALAXLLLSLPSPLSLLLLRLLGPRLLRPLLGFLGALAVGTLCGHATKPXSASGAPGYAPXASARAGAXAWGAGLKLGINLGWKNRXLAREQLKA

SEQ ID NO: 335 - protein, 119 aa, Homo sapiens; identical to SEQ ID NO: 263

SEQ ID NO: 336 - protein, 247 aa, Homo sapiens; identical to SEQ ID NO: 226

SEQ ID NO: 337 - protein, 86 aa, Homo sapiens
MLSRLLPPPFFFFLYFILRLMSPCQGKLLSSLYPMSPFSEYILNSNTSSSLYCHLATNFLSFLAWIIAIISKLDCLLSVLPCFHSL

SEQ ID NO: 338 - protein, 134 aa, Homo sapiens; identical to SEQ ID NO: 310

SEQ ID NO: 339 - protein, 119 aa, Homo sapiens; identical to SEQ ID NO: 263

SEQ ID NO: 340 - protein, 90 aa, Homo sapiens
MDRRRMALRPGSRRPTAFFFHSRWLVPNLLAFFLGLSGAGPIHLPMPWPNGRRHRVLDPHTQLSTHEAPGRWKPVAPRTMKACPQVLLEW

SEQ ID NO: 341 - protein, 187 aa, Homo sapiens
MYLQVETRTSSRLHLKRAPGIRSWSLLVGILSIGLAAAYYSGDSLGWKLFYVTGCLFVAVQNLEDWEEAIFDKSTGKVVLKTFSLYKKLLTLFRAGHDQVVVLLHDVRDVSVEEEKVRYFGKGYMVVLRLATGFSHPLTQSAVMGHRSDVEAIAKLITSFLELHCLESPTELSQSSDSEAGDPASQS

SEQ ID NO: 342 - protein, 97 aa, Homo sapiens; identical to SEQ ID NO: 255

SEQ ID NO: 343 - protein, 89 aa, Homo sapiens
MPAWVRPLHRAKKLIASPTLLSSLLQGAFARLEFLGHHWRSPAFSGTAATKRPCSPGSGSGPLVVTFFSPAALQRWPAWQWDIRGPVLL

SEQ ID NO: 344 - protein, 90 aa, Homo sapiens [sequence omitted]

SEQ ID NO: 345 - protein, 194 aa, Homo sapiens
MNLHASVLLLNIAFLLSPAFAMSPVPGSACTALAAALHYALLSCLTWMAIEGFNLYLLLGRVYNIYIRRYVFKLGVLGWGAPALLVLLSLSVKSSVYGPCTIPVFDSWENGTGFQNMSICWVRSPVVHSVLVMGYGGLTSLFNLVVLAWALWTLRRLRERADAPSVRACHDTVTVLGLTVLLGTCLLYTSQPEA

SEQ ID NO: 346 - protein, 335 aa, Homo sapiens [sequence omitted]

SEQ ID NO: 347 - protein, 209 aa, Homo sapiens [sequence omitted]

SEQ ID NO: 348 - protein, 244 aa, Homo sapiens
MNLHASVLLLNIAFLLSPAFAMSPVPGSACTALAAALHYALLSCLTWMAIEGFNLYLLLGRVYNIYIRRYVFKLGVLGWGAPALLVLLSLSVKSSVYGPCTIPVFDSWENGTGFQNMSICWVRSPVVHSVLVMGYGGLTSLFNLVVLAWALWTLRRLRERADAPSVRACHDTVTVLGLTVLLGTTWALAFFSFGVFLLPQLFLFTILNSLYGFFLFLWFCSQRCRSEAEAKAQIEAFSSSQTTQ

SEQ ID NO: 349 - protein, 151 aa, Homo sapiens; identical to SEQ ID NO: 209

SEQ ID NO: 350 - protein, 102 aa, Homo sapiens
  SITE (19): Xaa equals any of the naturally occurring L-amino acids
  SITE (66): Xaa equals any of the naturally occurring L-amino acids
  SITE (73): Xaa equals any of the naturally occurring L-amino acids
  SITE (91): Xaa equals any of the naturally occurring L-amino acids
  SITE (102): Xaa equals any of the naturally occurring L-amino acids
MWLCPLALNLILMAASGAXCEVKDVCVGSPGIPGTPGSHGLPGRDGRDGVKGDPGPPGPMGPPGEXPCPPGNXGLPGAPGVPGERGEKGEXAREALQGFQLX

SEQ ID NO: 351 - protein, 4 aa, Homo sapiens
RCWP

SEQ ID NO: 352 - protein, 146 aa, Homo sapiens
MTMRSLLRTPFLCGLLWAFCAPGARAEEPAASFSQPGSMGLDKNTVHDQEHIMEHLEGVINKPEAEMSPQELQLHYFKMHDYDGNNLLDGLELSTAITHVHKEEGSEQAPLMSEDELINIIDGVLRDDDKNNDGYIDYAEFAKSLQ

SEQ ID NO: 353 - protein, 67 aa, Homo sapiens
WGGAAPGAGVAGVSERQVQLPDQDGRRLPLGSRAPATPPPLLSRPGPAAARRPLPPVLDPGGCVRGP

SEQ ID NO: 354 - protein, 173 aa, Homo sapiens
MVRMVPVLLSLLLLLGPAVPQENQDGRYSLTYIYTGLSKHVEDVPAFQALGSLNDLQFFRYNSKDRKSQPMGLWRQVEGMEDWKQDSQLQKAREDIFMETLKDIVEYYNDSNGSHVLQGRFGCEIENNRSSGAFWKYYYDGKDYIEFNKEIPAWVPFDPAAQITKQKWDACLE

SEQ ID NO: 355 - protein, 69 aa, Homo sapiens
MHIFKHAQPALLYLVPACIGFPVLVALAKGEVTEMFSYEESNPKDPAAVTESKEGTEASASKGLEKKEK

SEQ ID NO: 356 - protein, 59 aa, Homo sapiens
LEWEGGAIRHPSQSLASWEAGSTSSWLLCLKAWLGAFLLGVFLFSNQQKRLLFKGGGSS

SEQ ID NO: 357 - protein, 65 aa, Homo sapiens
PGPSEPEGETRRRREQCWPEDKSKHTERAQTPGNRNVEPSLRSKQHGHMTTPTFCYCNKTSLSNW

SEQ ID NO: 358 - protein, 150 aa, Homo sapiens
  SITE (24): Xaa equals any of the naturally occurring L-amino acids
  SITE (57): Xaa equals any of the naturally occurring L-amino acids
LSVPMAKPTWVGALSPIHRILSAXAQTCTLWKISRSHRLLFLMMPAAKLCFFPLGGXVQEPSLQRGVCLSENSVKHPVQQSWNHGEDSGLKHLEVIHEQPDISLEKSDFSSMTQHYTLYNSLKHMGERQERYQSIIWARIDCILCCFHKS

SEQ ID NO: 359 - protein, 268 aa, Homo sapiens [sequence omitted]

SEQ ID NO: 360 - protein, 347 aa, Homo sapiens [sequence omitted]

SEQ ID NO: 361 - protein, 97 aa, Homo sapiens; identical to SEQ ID NO: 255

SEQ ID NO: 362 - protein, 119 aa, Homo sapiens; identical to SEQ ID NO: 263

SEQ ID NO: 363 - protein, 208 aa, Homo sapiens
MHLARLVGSCSLLLLLGALSGWAASDDPIEKVIEGINRGLSNAEREVGKALDGINSGITHAGREVEKVFNGLSNMGSHTGKELDKGVQGLNHGMDKVAHEINHGIGQAGKEAEKLGHGVNNAAGQAGKEADKAVQGFHTGVHQAGKEAEKLGQGVNHAADQAGKEVEKLGQGAHHAAGQAGKELQNAHNGVNQASKEANQLLNGNHQS

SEQ ID NO: 364 - protein, 77 aa, Homo sapiens; identical to SEQ ID NO: 268
  SITE (53): Xaa equals any of the naturally occurring L-amino acids

SEQ ID NO: 365 - protein, 86 aa, Homo sapiens; identical to SEQ ID NO: 337

SEQ ID NO: 366 - protein, 7 aa, Homo sapiens
VWLPLLS

SEQ ID NO: 367 - protein, 90 aa, Homo sapiens
MDRRRMALRPGSRRPTAFFFHSRWLVPNLLAFFLGLSGAGPIHLPMPWPNGRRHRVLDPHTQLSTHEAPGRWKPVAPRRMKACPQVLLEW

SEQ ID NO: 368 - protein, 90 aa, Homo sapiens; identical to SEQ ID NO: 340

SEQ ID NO: 369 - protein, 66 aa, Homo sapiens
  SITE (3): Xaa equals any of the naturally occurring L-amino acids
  SITE (6): Xaa equals any of the naturally occurring L-amino acids
  SITE (22): Xaa equals any of the naturally occurring L-amino acids
  SITE (25): Xaa equals any of the naturally occurring L-amino acids
  SITE (61): Xaa equals any of the naturally occurring L-amino acids
TPXILXRQCSWSPECTQVLPGXVCXERAWPDALACELGTPGPCEPLGGRPRNGWVGQGTPXPHVWL

SEQ ID NO: 370 - protein, 97 aa, Homo sapiens; identical to SEQ ID NO: 255

SEQ ID NO: 371 - protein, 97 aa, Homo sapiens; identical to SEQ ID NO: 255

SEQ ID NO: 372 - protein, 64 aa, Homo sapiens
ARFFFPLSPSFPFGYRGIVAPRDHVKVRKPFSHCGAVQMWETSKMVAHFKSFHLSSLFLLSLLP

SEQ ID NO: 373 - protein, 142 aa, Homo sapiens [sequence omitted]

SEQ ID NO: 374 - protein, 151 aa, Homo sapiens; identical to SEQ ID NO: 209

SEQ ID NO: 375 - protein, 131 aa, Homo sapiens
VPAPKVPIKMQVKHWPSEQDPEKAWGARVVEPPEKDDQLVVLFPVQKPKLLTTEEKPRGQGRGPILPGTKAWMETEDTLGRVLSPEPDHDSLYHPPPEEDQGEERPRLWVMPNHQVLLGPEEDQDPIFPPQ

SEQ ID NO: 376 - protein, 132 aa, Homo Sapiens
VPAPKVPIKMQVKHWPSEQDPENRAWGARVVEPPEKDDQLVVLFPVQKPKLLTTEEKPRGQGRGPILPGTKAWMETEDTLGRVLSPEPDHDSLYHPPPEEDQGEERPRLWVMPNHQVLLGPEEDQDHIYHPQ

SEQ ID NO: 377 - protein, 122 aa, Homo Sapiens
VPAPKVPIKMQVKHWPSEQDPEKAWGARVVEPPEKDDQLVVLFPVQKPKLLTTEEKPRGTKAWMETEDTLGRVLSPEPDHDSLYHPPPEEDQGEERPRLWVMPNHQVLLGPEEDQDHIYHPQ

SEQ ID NO: 378 - protein, 99 aa, Homo Sapiens
VPAPKVPIKMQVKHWPSEQDPEKAWGARVVEPPEKDDQLVVLFPVQKPKLLTTEEKPRGTKAWMETEDTLGRVLSPEPDHDSLYHPPPEEDQGEERPRL

What is claimed is:

1. Use of a polypeptide for the preparation of a diagnostic or pharmaceutical composition for diagnosing or treating a medical condition, wherein said polypeptide comprises an amino acid sequence at least 95% identical to a sequence selected from the group consisting of:
(a) a full length polypeptide of SEQ ID NO:Y or a full length polypeptide encoded by the cDNA Clone ID in ATCC Deposit No:Z corresponding to SEQ ID NO:Y as referenced in Table 1A;
(b) a predicted secreted form of SEQ ID NO:Y or a secreted form of the polypeptide encoded by the cDNA Clone ID in ATCC Deposit No:Z corresponding to SEQ ID NO:Y as referenced in Table 1A;
(c) a polypeptide fragment of SEQ ID NO:Y or a polypeptide fragment encoded by the cDNA Clone ID in ATCC Deposit No:Z corresponding to SEQ ID NO:Y as referenced in Table 1A;
(d) a polypeptide fragment of SEQ ID NO:Y or a polypeptide fragment encoded by the cDNA Clone ID in ATCC Deposit No:Z corresponding to SEQ ID NO:Y as referenced in Table 1A, wherein said fragment has biological activity;
(e) a polypeptide domain of SEQ ID NO:Y as referenced in Table 1B;
(f) a polypeptide domain of SEQ ID NO:Y as referenced in Table 2; and
(g) a predicted epitope of SEQ ID NO:Y as referenced in Table 1B.

2. Use of the polypeptide of claim 1, wherein said wherein said polypeptide comprises a heterologous amino acid sequence.

3. Use of a polypeptide for the preparation of a diagnostic or pharmaceutical composition for diagnosing or treating a medical condition, wherein said polypeptide comprises an amino acid sequence selected from the group consisting of:
(a) a full length polypeptide of SEQ ID NO:Y or a full length polypeptide encoded by the cDNA Clone ID in ATCC Deposit No:Z corresponding to SEQ ID NO:Y as referenced in Table 1A;
(b) a predicted secreted form of SEQ ID NO:Y or a secreted form of the polypeptide encoded by the cDNA Clone ID in ATCC Deposit No:Z corresponding to SEQ ID NO:Y as referenced in Table 1A;
(c) a polypeptide fragment of SEQ ID NO:Y or a polypeptide fragment encoded by the cDNA Clone ID in ATCC Deposit No:Z corresponding to SEQ ID NO:Y as referenced in Table 1A;
(d) a polypeptide fragment of SEQ ID NO:Y or a polypeptide fragment encoded by the cDNA Clone ID in ATCC Deposit No:Z corresponding to SEQ ID NO:Y as referenced in Table 1A, wherein said fragment has biological activity;
(e) a polypeptide domain of SEQ ID NO:Y as referenced in Table 1B;
(f) a polypeptide domain of SEQ ID NO:Y as referenced in Table 2; and
(g) a predicted epitope of SEQ ID NO:Y as referenced in Table 1B.

4. Use of the polypeptide of claim 3, wherein said polypeptide comprises a heterologous amino acid sequence.

5. Use of an antibody or fragment thereof for the preparation of a diagnostic or pharmaceutical composition for diagnosing or treating a medical condition, wherein said antibody or fragment thereof binds a polypeptide comprising an amino acid sequence at least 95% identical to a sequence selected from the group consisting of:
(a) a full length polypeptide of SEQ ID NO:Y or a full length polypeptide encoded by the cDNA Clone ID in ATCC Deposit No:Z corresponding to SEQ ID NO:Y as referenced in Table 1A;
(b) a predicted secreted form of SEQ ID NO:Y or a secreted form of the polypeptide encoded by the cDNA Clone ID in ATCC Deposit No:Z corresponding to SEQ ID NO:Y as referenced in Table 1A;
(c) a polypeptide fragment of SEQ ID NO:Y or a polypeptide fragment encoded by the cDNA Clone ID in ATCC Deposit No:Z corresponding to SEQ ID NO:Y as referenced in Table 1A;
(d) a polypeptide fragment of SEQ ID NO:Y or a polypeptide fragment encoded by the cDNA Clone ID in ATCC Deposit No:Z corresponding to SEQ ID NO:Y as referenced in Table 1A, wherein said fragment has biological activity;
(e) a polypeptide domain of SEQ ID NO:Y as referenced in Table 1B;
(f) a polypeptide domain of SEQ ID NO:Y as referenced in Table 2; and
(g) a predicted epitope of SEQ ID NO:Y as referenced in Table 1B.

6. Use of an antibody or fragment thereof for the preparation of a diagnostic or pharmaceutical composition for diagnosing or treating a medical condition, wherein said antibody or fragment thereof binds a polypeptide selected from the group consisting of:
(a) a full length polypeptide of SEQ ID NO:Y or a full length polypeptide encoded by the cDNA Clone ID in ATCC Deposit No:Z corresponding to SEQ ID NO:Y as referenced in Table 1A;
(b) a predicted secreted form of SEQ ID NO:Y or a secreted form of the polypeptide encoded by the cDNA Clone ID in ATCC Deposit No:Z corresponding to SEQ ID NO:Y as referenced in Table 1A;
(c) a polypeptide fragment of SEQ ID NO:Y or a polypeptide fragment encoded by the cDNA Clone ID in ATCC Deposit No:Z corresponding to SEQ ID NO:Y as referenced in Table 1A;
(d) a polypeptide fragment of SEQ ID NO:Y or a polypeptide fragment encoded by the cDNA Clone ID in ATCC Deposit No:Z corresponding to SEQ ID NO:Y as referenced in Table 1A, wherein said fragment has biological activity;
(e) a polypeptide domain of SEQ ID NO:Y as referenced in Table 1B;
(f) a polypeptide domain of SEQ ID NO:Y as referenced in Table 2; and
(g) a predicted epitope of SEQ ID NO:Y as referenced in Table 1B.

7. Use of a nucleic acid molecule for the preparation of a diagnostic or pharmaceutical composition for diagnosing or treating a medical condition, wherein said nucleic acid molecule comprises a polynucleotide sequence at least 95% identical to a sequence selected from the group consisting of:
(a) a polynucleotide fragment of SEQ ID NO:X as referenced in Table 1A;
(b) a polynucleotide encoding a full length polypeptide of SEQ ID NO:Y or a full length polypeptide encoded by the cDNA Clone ID in ATCC Deposit No:Z corresponding to SEQ ID NO:Y as referenced in Table 1A;
(c) a polynucleotide encoding a predicted secreted form of SEQ ID NO:Y or a secreted form of the polypeptide encoded by the cDNA Clone ID in ATCC Deposit No:Z corresponding to SEQ ID NO:Y as referenced in Table 1A;
(d) a polynucleotide encoding a polypeptide fragment of SEQ ID NO:Y or a polypeptide fragment encoded by the cDNA Clone ID in ATCC Deposit No:Z corresponding to SEQ ID NO:Y as referenced in Table 1A;
(e) a polynucleotide encoding a polypeptide fragment of SEQ ID NO:Y or a polypeptide fragment encoded by the cDNA Clone ID in ATCC Deposit No:Z corresponding to SEQ ID NO:Y as referenced in Table 1A, wherein said fragment has biological activity;
(f) a polynucleotide encoding a polypeptide domain of SEQ ID NO:Y as referenced in Table 1B;
(g) a polynucleotide encoding a polypeptide domain of SEQ ID NO:Y as referenced in Table 2; and
(h) a polynucleotide encoding a predicted epitope of SEQ ID NO:Y as referenced in Table 1B.

8. Use of the nucleic acid molecule of claim 7, wherein said nucleic acid molecule comprises a heterologous polynucleotide sequence.

9. Use of a nucleic acid molecule for the preparation of a diagnostic or pharmaceutical composition for diagnosing or treating a medical condition, wherein said nucleic acid molecule comprises a polynucleotide sequence selected from the group consisting of:
(a) a polynucleotide fragment of SEQ ID NO:X as referenced in Table 1A;
(b) a polynucleotide encoding a full length polypeptide of SEQ ID NO:Y or a full length polypeptide encoded by the cDNA Clone ID in ATCC Deposit No:Z corresponding to SEQ ID NO:Y as referenced in Table 1A;
(c) a polynucleotide encoding a predicted secreted form of SEQ ID NO:Y or a secreted form of the polypeptide encoded by the cDNA Clone ID in ATCC Deposit No:Z corresponding to SEQ ID NO:Y as referenced in Table 1A;
(d) a polynucleotide encoding a polypeptide fragment of SEQ ID NO:Y or a polypeptide fragment encoded by the cDNA Clone ID in ATCC Deposit No:Z corresponding to SEQ ID NO:Y as referenced in Table 1A;
(e) a polynucleotide encoding a polypeptide fragment of SEQ ID NO:Y or a polypeptide fragment encoded by the cDNA Clone ID in ATCC Deposit No:Z corresponding to SEQ ID NO:Y as referenced in Table 1A, wherein said fragment has biological activity;
(f) a polynucleotide encoding a polypeptide domain of SEQ ID NO:Y as referenced in Table 1B;
(g) a polynucleotide encoding a polypeptide domain of SEQ ID NO:Y as referenced in Table 2; and
(h) a polynucleotide encoding a predicted epitope of SEQ ID NO:Y as referenced in Table 1B.

10. Use of the nucleic acid molecule of claim 9, wherein said nucleic acid molecule comprises a heterologous polynucleotide sequence.

11. Use of an agonist or antagonist for the preparation of a pharmaceutical composition for treating a medical condition, wherein said agonist or antagonist binds a polypeptide comprising an amino acid sequence at least 95% identical to a sequence selected from the group consisting of:
(a) a full length polypeptide of SEQ ID NO:Y or a full length polypeptide encoded by the cDNA Clone ID in ATCC Deposit No:Z corresponding to SEQ ID NO:Y as referenced in Table 1A;
(b) a predicted secreted form of SEQ ID NO:Y or a secreted form of the polypeptide encoded by the cDNA Clone ID in ATCC Deposit No:Z corresponding to SEQ ID NO:Y as referenced in Table 1A;
(c) a polypeptide fragment of SEQ ID NO:Y or a polypeptide fragment encoded by the cDNA Clone ID in ATCC Deposit No:Z corresponding to SEQ ID NO:Y as referenced in Table 1A;
(d) a polypeptide fragment of SEQ ID NO:Y or a polypeptide fragment encoded by the cDNA Clone ID in ATCC Deposit No:Z corresponding to SEQ ID NO:Y as referenced in Table 1A, wherein said fragment has biological activity;
(e) a polypeptide domain of SEQ ID NO:Y as referenced in Table 1B;
(f) a polypeptide domain of SEQ ID NO:Y as referenced in Table 2; and
(g) a predicted epitope of SEQ ID NO:Y as referenced in Table 1B.

12. Use of an agonist or antagonist for the preparation of a pharmaceutical composition for treating a medical condition, wherein said agonist or antagonist binds a polypeptide selected from the group consisting of:
(a) a full length polypeptide of SEQ ID NO:Y or a full length polypeptide encoded by the cDNA Clone ID in ATCC Deposit No:Z corresponding to SEQ ID NO:Y as referenced in Table 1A;
(b) a predicted secreted form of SEQ ID NO:Y or a secreted form of the polypeptide encoded by the cDNA Clone ID in ATCC Deposit No:Z corresponding to SEQ ID NO:Y as referenced in Table 1A;
(c) a polypeptide fragment of SEQ ID NO:Y or a polypeptide fragment encoded by the cDNA Clone ID in ATCC Deposit No:Z corresponding to SEQ ID NO:Y as referenced in Table 1A;
(d) a polypeptide fragment of SEQ ID NO:Y or a polypeptide fragment encoded by the cDNA Clone ID in ATCC Deposit No:Z corresponding to SEQ ID NO:Y as referenced in Table 1A, wherein said fragment has biological activity;
(e) a polypeptide domain of SEQ ID NO:Y as referenced in Table 1B;
(f) a polypeptide domain of SEQ ID NO:Y as referenced in Table 2; and
(g) a predicted epitope of SEQ ID NO:Y as referenced in Table 1B.

13. A polypeptide comprising an amino acid sequence at least 95% identical to a sequence selected from the group consisting of:
(a) a full length polypeptide of SEQ ID NO:Y or a full length polypeptide encoded by the cDNA Clone ID in ATCC Deposit No:Z corresponding to SEQ ID NO:Y as referenced in Table 1A;
(b) a predicted secreted form of SEQ ID NO:Y or a secreted form of the polypeptide encoded by the cDNA Clone ID in ATCC Deposit No:Z corresponding to SEQ ID NO:Y as referenced in Table 1A;
(c) a polypeptide fragment of SEQ ID NO:Y or a polypeptide fragment encoded by the cDNA Clone ID in ATCC Deposit No:Z corresponding to SEQ ID NO:Y as referenced in Table 1A;
(d) a polypeptide fragment of SEQ ID NO:Y or a polypeptide fragment encoded by the cDNA Clone ID in ATCC Deposit No:Z corresponding to SEQ ID NO:Y as referenced in Table 1A, wherein said fragment has biological activity;
(e) a polypeptide domain of SEQ ID NO:Y as referenced in Table 1B;
(f) a polypeptide domain of SEQ ID NO:Y as referenced in Table 2; and
(g) a predicted epitope of SEQ ID NO:Y as referenced in Table 1B.

14. The polypeptide of claim 13, wherein said polypeptide comprises a heterologous amino acid sequence.

15. Use of the polypeptide of claim 13 for identifying a binding partner comprising:
(a) contacting the polypeptide of claim 13 with a binding partner; and
(b) determining whether the binding partner increases or decreases activity of the polypeptide.

16. A polypeptide comprising an amino acid sequence selected from the group consisting of:
(a) a full length polypeptide of SEQ ID NO:Y or a full length polypeptide encoded by the cDNA Clone ID in ATCC Deposit No:Z corresponding to SEQ ID NO:Y as referenced in Table 1A;
(b) a predicted secreted form of SEQ ID NO:Y or a secreted form of the polypeptide encoded by the cDNA Clone ID in ATCC Deposit No:Z corresponding to SEQ ID NO:Y as referenced in Table 1A;
(c) a polypeptide fragment of SEQ ID NO:Y or a polypeptide fragment encoded by the cDNA Clone ID in ATCC Deposit No:Z corresponding to SEQ ID NO:Y as referenced in Table 1A;
(d) a polypeptide fragment of SEQ ID NO:Y or a polypeptide fragment encoded by the cDNA Clone ID in ATCC Deposit No:Z corresponding to SEQ ID NO:Y as referenced in Table 1A, wherein said fragment has biological activity;
(e) a polypeptide domain of SEQ ID NO:Y as referenced in Table 1B;
(f) a polypeptide domain of SEQ ID NO:Y as referenced in Table 2; and
(g) a predicted epitope of SEQ ID NO:Y as referenced in Table 1B.

17. The polypeptide of claim 16, wherein said polypeptide comprises a heterologous polypeptide sequence.

18. Use of the polypeptide of claim 16 for identifying a binding partner comprising:
(a) contacting the polypeptide of claim 16 with a binding partner; and
(b) determining whether the binding partner increases or decreases activity of the polypeptide.

19. An antibody or fragment thereof that binds a polypeptide comprising an amino acid sequence at least 95% identical to a sequence selected from the group consisting of:
(a) a full length polypeptide of SEQ ID NO:Y or a full length polypeptide encoded by the cDNA Clone ID in ATCC Deposit No:Z corresponding to SEQ ID NO:Y as referenced in Table 1A;
(b) a predicted secreted form of SEQ ID NO:Y or a secreted form of the polypeptide encoded by the cDNA Clone ID in ATCC Deposit No:Z corresponding to SEQ ID NO:Y as referenced in Table 1A;
(c) a polypeptide fragment of SEQ ID NO:Y or a polypeptide fragment encoded by the cDNA Clone ID in ATCC Deposit No:Z corresponding to SEQ ID NO:Y as referenced in Table 1A;
(d) a polypeptide fragment of SEQ ID NO:Y or a polypeptide fragment encoded by the cDNA Clone ID in ATCC Deposit No:Z corresponding to SEQ ID NO:Y as referenced in Table 1A, wherein said fragment has biological activity;
(e) a polypeptide domain of SEQ ID NO:Y as referenced in Table 1B;
(f) a polypeptide domain of SEQ ID NO:Y as referenced in Table 2; and
(g) a predicted epitope of SEQ ID NO:Y as referenced in Table 1B.

20. An antibody or fragment thereof that binds a polypeptide selected from the group consisting of:
(a) a full length polypeptide of SEQ ID NO:Y or a full length polypeptide encoded by the cDNA Clone ID in ATCC Deposit No:Z corresponding to SEQ ID NO:Y as referenced in Table 1A;
(b) a predicted secreted form of SEQ ID NO:Y or a secreted form of the polypeptide encoded by the cDNA Clone ID in ATCC Deposit No:Z corresponding to SEQ ID NO:Y as referenced in Table 1A;
(c) a polypeptide fragment of SEQ ID NO:Y or a polypeptide fragment encoded by the cDNA Clone ID in ATCC Deposit No:Z corresponding to SEQ ID NO:Y as referenced in Table 1A;
(d) a polypeptide fragment of SEQ ID NO:Y or a polypeptide fragment encoded by the cDNA Clone ID in ATCC Deposit No:Z corresponding to SEQ ID NO:Y as referenced in Table 1A, wherein said fragment has biological activity;
(e) a polypeptide domain of SEQ ID NO:Y as referenced in Table 1B;
(f) a polypeptide domain of SEQ ID NO:Y as referenced in Table 2; and
(g) a predicted epitope of SEQ ID NO:Y as referenced in Table 1B.

21. A nucleic acid molecule comprising a polynucleotide sequence at least 95% identical to a sequence selected from the group consisting of:
(a) a polynucleotide fragment of SEQ ID NO:X as referenced in Table 1A;
(b) a polynucleotide encoding a full length polypeptide of SEQ ID NO:Y or a full length polypeptide encoded by the cDNA Clone ID in ATCC Deposit No:Z corresponding to SEQ ID NO:Y as referenced in Table 1A;
(c) a polynucleotide encoding a predicted secreted form of SEQ ID NO:Y or a secreted form of the polypeptide encoded by the cDNA Clone ID in ATCC Deposit No:Z corresponding to SEQ ID NO:Y as referenced in Table 1A;
(d) a polynucleotide encoding a polypeptide fragment of SEQ ID NO:Y or a polypeptide fragment encoded by the cDNA Clone ID in ATCC Deposit No:Z corresponding to SEQ ID NO:Y as referenced in Table 1A;
(e) a polynucleotide encoding a polypeptide fragment of SEQ ID NO:Y or a polypeptide fragment encoded by the cDNA Clone ID in ATCC Deposit No:Z corresponding to SEQ ID NO:Y as referenced in Table 1A, wherein said fragment has biological activity;
(f) a polynucleotide encoding a polypeptide domain of SEQ ID NO:Y as referenced in Table 1B;
(g) a polynucleotide encoding a polypeptide domain of SEQ ID NO:Y as referenced in Table 2; and
(h) a polynucleotide encoding a predicted epitope of SEQ ID NO:Y as referenced in Table 1B.

22. The nucleic acid molecule of claim 21, wherein said nucleic acid molecule comprises a heterologous polynucleotide sequence.

23. A recombinant vector comprising the nucleic acid molecule of claim 21.

24. A recombinant vector comprising the nucleic acid molecule of claim 22.

25. A recombinant host cell comprising the recombinant vector of claim 23.

26. A recombinant host cell comprising the recombinant vector of claim 24.

27. A nucleic acid molecule comprising a polynucleotide sequence selected from the group consisting of:
(a) a polynucleotide fragment of SEQ ID NO:X as referenced in Table 1A;
(b) a polynucleotide encoding a full length polypeptide of SEQ ID NO:Y or a full length polypeptide encoded by the cDNA Clone ID in ATCC Deposit No:Z corresponding to SEQ ID NO:Y as referenced in Table 1A;
(c) a polynucleotide encoding a predicted secreted form of SEQ ID NO:Y or a secreted form of the polypeptide encoded by the cDNA Clone ID in ATCC Deposit No:Z corresponding to SEQ ID NO:Y as referenced in Table 1A;
(d) a polynucleotide encoding a polypeptide fragment of SEQ ID NO:Y or a polypeptide fragment encoded by the cDNA Clone ID in ATCC Deposit No:Z corresponding to SEQ ID NO:Y as referenced in Table 1A;
(e) a polynucleotide encoding a polypeptide fragment of SEQ ID NO:Y or a polypeptide fragment encoded by the cDNA Clone ID in ATCC Deposit No:Z corresponding to SEQ ID NO:Y as referenced in Table 1A, wherein said fragment has biological activity;
(f) a polynucleotide encoding a polypeptide domain of SEQ ID NO:Y as referenced in Table 1B;
(g) a polynucleotide encoding a polypeptide domain of SEQ ID NO:Y as referenced in Table 2; and
(h) a polynucleotide encoding a predicted epitope of SEQ ID NO:Y as referenced in Table 1B.

28. The nucleic acid molecule of claim 27, wherein said nucleic acid molecule comprises a heterologous polynucleotide sequence.

29. A recombinant vector comprising the nucleic acid molecule of claim 27.

30. A recombinant vector comprising the nucleic acid molecule of claim 28.

31. A recombinant host cell comprising the recombinant vector of claim 29.

32. A recombinant host cell comprising the recombinant vector of claim 30.
